United States Patent Application Publication US 2025/0305002 A1 - sequence listing, part 7

SEQ ID NO: 21537 - protein, 2088 aa, synthetic construct
MPAAKRVKLDGGDKKYSIGLDIGTNSVGWAVITDEYKVPSKKFKVLGNTDRHSIKKNLIGALLFDSGETAEATRLKRTARRRYTRRKNRICYLQEIFSNEMAKVDDSFFHRLEESFLVEEDKKHERHPIFGNIVDEVAYHEKYPTIYHLRKKLVDSTDKADLRLIYLALAHMIKFRGHFLIEGDLNPDNSDVDKLFIQLVQTYNQLFEENPINASGVDAKAILSARLSKSRRLENLIAQLPGEKKNGLFGNLIALSLGLTPNFKSNFDLAEDAKLQLSKDTYDDDLDNLLAQIGDQYADLFLAAKNLSDAILLSDILRVNTEITKAPLSASMIKRYDEHHQDLTLLKALVRQQLPEKYKEIFFDQSKNGYAGYIDGGASQEEFYKFIKPILEKMDGTEELLVKLNREDLLRKQRTFDNGSIPHQIHLGELHAILRRQEDFYPFLKDNREKIEKILTFRIPYYVGPLARGNSRFAWMTRKSEETITPWNFEEVVDKGASAQSFIERMTNFDKNLPNEKVLPKHSLLYEYFTVYNELTKVKYVTEGMRKPAFLSGEQKKAIVDLLFKTNRKVTVKQLKEDYFKKIECFDSVEISGVEDRFNASLGTYHDLLKIIKDKDFLDNEENEDILEDIVLTLTLFEDREMIEERLKTYAHLFDDKVMKQLKRRRYTGWGRLSRKLINGIRDKQSGKTILDFLKSDGFANRNFMQLIHDDSLTFKEDIQKAQVSGQGDSLHEHIANLAGSPAIKKGILQTVKVVDELVKVMGRHKPENIVIEMARENQTTQKGQKNSRERMKRIEEGIKELGSQILKEHPVENTQLQNEKLYLYYLQNGRDMYVDQELDINRLSDYDVDHIVPQSFLKDDSIDNKVLTRSDKARGKSDNVPSEEVVKKMKNYWRQLLNAKLITQRKFDNLTKAERGGLSELDKAGFIKRQLVETRQITKHVAQILDSRMNTKYDENDKLIREVKVITLKSKLVSDFRKDFQFYKVREINNYHHAHDAYLNAVVGTALIKKYPKLESEFVYGDYKVYDVRKMIAKSEQEIGKATAKYFFYSNIMNFFKTEITLANGEIRKRPLIETNGETGEIVWDKGRDFATVRKVLSMPQVNIVKKTEVQTGGFSKESILPKRNSDKLIARKKDWDPKKYGGFDSPTVAYSVLVVAKVEKGKSKKLKSVKELLGITIMERSSFEKNPIDFLEAKGYKEVKKDLIIKLPKYSLFELENGRKRMLASAGELQKGNELALPSKYVNFLYLASHYEKLKGSPEDNEQKQLFVEQHKHYLDEIIEQISEFSKRVILADANLDKVLSAYNKHRDKPIREQAENIIHLFTLTNLGAPAAFKYFDTTIDRKRYTSTKEVLDATLIHQSITGLYETRIDLSQLGGDGGEAAAKGSSPAPGGLDDEYRLYSPLVKPDQNIQFWLEQFPQAWAETAGMGLAKQVPPQVIQLKASATPVSVRQYPLSKEAQEGIRPHVQRLIQQGILVPVQSPWNTPLLPVRKPGTNDYRPVQDLREVNKRVQDIHPTVPNPYNLLCALPPQRSWYTVLDLKDAFFCLRLHPTSQPLFAFEWRDPGTGRTGQLTWTRLPQGFKNSPTIFNEALHRDLANFRIQHPQVTLLQYVDDLLLAGATKQDCLEGTKALLLELSDLGYRASAKKAQICRREVTYLGYSLRDGQRWLTEARKKTVVQIPAPTTAKQVREFLGKAGFCRLFIPGFATLAAPLYPLTKPKGEFSWAPEHQKAFDAIKKALLSAPALALPDVTKPFTLYVDERKGVARGVLTQTLGPWRRPVAYLSKKLDPVASGWPVCLKAIAAVAILVKDADKLTLGQNITVIAPHALENIVRQPPDRWMTNARMTHYQSLLLTERVTFAPPAALNPATLLPEETDEPVTHDCHQLLIEETGVRKDLTDIPLTGEVLTWFTDGSSYVVEGKRMAGAAVVDGTRTIWASSLPEGTSAQKAELMALTQALRLAEGKSINIYTDSRYAFATAHVHGAIYKQRGWLTSAGREIKNKEEILSLLEALHLPKRLAIIHCPGHQKAKDPISRGNQMADRVAKQAAQGVNLLPAGKRTADGSEFEKRTADGSEFESPKKKAKVE

SEQ ID NO: 21538 - protein, 2088 aa, synthetic construct
MPAAKRVKLDGGDKKYSIGLDIGTNSVGWAVITDEYKVPSKKFKVLGNTDRHSIKKNLIGALLFDSGETAEATRLKRTARRRYTRRKNRICYLQEIFSNEMAKVDDSFFHRLEESFLVEEDKKHERHPIFGNIVDEVAYHEKYPTIYHLRKKLVDSTDKADLRLIYLALAHMIKFRGHFLIEGDLNPDNSDVDKLFIQLVQTYNQLFEENPINASGVDAKAILSARLSKSRRLENLIAQLPGEKKNGLFGNLIALSLGLTPNFKSNFDLAEDAKLQLSKDTYDDDLDNLLAQIGDQYADLFLAAKNLSDAILLSDILRVNTEITKAPLSASMIKRYDEHHQDLTLLKALVRQQLPEKYKEIFFDQSKNGYAGYIDGGASQEEFYKFIKPILEKMDGTEELLVKLNREDLLRKQRTFDNGSIPHQIHLGELHAILRRQEDFYPFLKDNREKIEKILTFRIPYYVGPLARGNSRFAWMTRKSEETITPWNFEEVVDKGASAQSFIERMTNFDKNLPNEKVLPKHSLLYEYFTVYNELTKVKYVTEGMRKPAFLSGEQKKAIVDLLFKTNRKVTVKQLKEDYFKKIECFDSVEISGVEDRFNASLGTYHDLLKIIKDKDFLDNEENEDILEDIVLTLTLFEDREMIEERLKTYAHLFDDKVMKQLKRRRYTGWGRLSRKLINGIRDKQSGKTILDFLKSDGFANRNFMQLIHDDSLTFKEDIQKAQVSGQGDSLHEHIANLAGSPAIKKGILQTVKVVDELVKVMGRHKPENIVIEMARENQTTQKGQKNSRERMKRIEEGIKELGSQILKEHPVENTQLQNEKLYLYYLQNGRDMYVDQELDINRLSDYDVDHIVPQSFLKDDSIDNKVLTRSDKARGKSDNVPSEEVVKKMKNYWRQLLNAKLITQRKFDNLTKAERGGLSELDKAGFIKRQLVETRQITKHVAQILDSRMNTKYDENDKLIREVKVITLKSKLVSDFRKDFQFYKVREINNYHHAHDAYLNAVVGTALIKKYPKLESEFVYGDYKVYDVRKMIAKSEQEIGKATAKYFFYSNIMNFFKTEITLANGEIRKRPLIETNGETGEIVWDKGRDFATVRKVLSMPQVNIVKKTEVQTGGFSKESILPKRNSDKLIARKKDWDPKKYGGFDSPTVAYSVLVVAKVEKGKSKKLKSVKELLGITIMERSSFEKNPIDFLEAKGYKEVKKDLIIKLPKYSLFELENGRKRMLASAGELQKGNELALPSKYVNFLYLASHYEKLKGSPEDNEQKQLFVEQHKHYLDEIIEQISEFSKRVILADANLDKVLSAYNKHRDKPIREQAENIIHLFTLTNLGAPAAFKYFDTTIDRKRYTSTKEVLDATLIHQSITGLYETRIDLSQLGGDGGGGSPAPEAAAKGGLDDEYRLYSPLVKPDQNIQFWLEQFPQAWAETAGMGLAKQVPPQVIQLKASATPVSVRQYPLSKEAQEGIRPHVQRLIQQGILVPVQSPWNTPLLPVRKPGTNDYRPVQDLREVNKRVQDIHPTVPNPYNLLCALPPQRSWYTVLDLKDAFFCLRLHPTSQPLFAFEWRDPGTGRTGQLTWTRLPQGFKNSPTIFNEALHRDLANFRIQHPQVTLLQYVDDLLLAGATKQDCLEGTKALLLELSDLGYRASAKKAQICRREVTYLGYSLRDGQRWLTEARKKTVVQIPAPTTAKQVREFLGKAGFCRLFIPGFATLAAPLYPLTKPKGEFSWAPEHQKAFDAIKKALLSAPALALPDVTKPFTLYVDERKGVARGVLTQTLGPWRRPVAYLSKKLDPVASGWPVCLKAIAAVAILVKDADKLTLGQNITVIAPHALENIVRQPPDRWMTNARMTHYQSLLLTERVTFAPPAALNPATLLPEETDEPVTHDCHQLLIEETGVRKDLTDIPLTGEVLTWFTDGSSYVVEGKRMAGAAVVDGTRTIWASSLPEGTSAQKAELMALTQALRLAEGKSINIYTDSRYAFATAHVHGAIYKQRGWLTSAGREIKNKEEILSLLEALHLPKRLAIIHCPGHQKAKDPISRGNQMADRVAKQAAQGVNLLPAGKRTADGSEFEKRTADGSEFESPKKKAKVE

SEQ ID NO: 21539 - protein, 2084 aa, synthetic construct; identical to SEQ ID NO: 77

SEQ ID NO: 21540 - protein, 2081 aa, synthetic construct; identical to SEQ ID NO: 66

SEQ ID NO: 21541 - protein, 2080 aa, synthetic construct
MPAAKRVKLDGGDKKYSIGLDIGTNSVGWAVITDEYKVPSKKFKVLGNTDRHSIKKNLIGALLFDSGETAEATRLKRTARRRYTRRKNRICYLQEIFSNEMAKVDDSFFHRLEESFLVEEDKKHERHPIFGNIVDEVAYHEKYPTIYHLRKKLVDSTDKADLRLIYLALAHMIKFRGHFLIEGDLNPDNSDVDKLFIQLVQTYNQLFEENPINASGVDAKAILSARLSKSRRLENLIAQLPGEKKNGLFGNLIALSLGLTPNFKSNFDLAEDAKLQLSKDTYDDDLDNLLAQIGDQYADLFLAAKNLSDAILLSDILRVNTEITKAPLSASMIKRYDEHHQDLTLLKALVRQQLPEKYKEIFFDQSKNGYAGYIDGGASQEEFYKFIKPILEKMDGTEELLVKLNREDLLRKQRTFDNGSIPHQIHLGELHAILRRQEDFYPFLKDNREKIEKILTFRIPYYVGPLARGNSRFAWMTRKSEETITPWNFEEVVDKGASAQSFIERMTNFDKNLPNEKVLPKHSLLYEYFTVYNELTKVKYVTEGMRKPAFLSGEQKKAIVDLLFKTNRKVTVKQLKEDYFKKIECFDSVEISGVEDRFNASLGTYHDLLKIIKDKDFLDNEENEDILEDIVLTLTLFEDREMIEERLKTYAHLFDDKVMKQLKRRRYTGWGRLSRKLINGIRDKQSGKTILDFLKSDGFANRNFMQLIHDDSLTFKEDIQKAQVSGQGDSLHEHIANLAGSPAIKKGILQTVKVVDELVKVMGRHKPENIVIEMARENQTTQKGQKNSRERMKRIEEGIKELGSQILKEHPVENTQLQNEKLYLYYLQNGRDMYVDQELDINRLSDYDVDHIVPQSFLKDDSIDNKVLTRSDKARGKSDNVPSEEVVKKMKNYWRQLLNAKLITQRKFDNLTKAERGGLSELDKAGFIKRQLVETRQITKHVAQILDSRMNTKYDENDKLIREVKVITLKSKLVSDFRKDFQFYKVREINNYHHAHDAYLNAVVGTALIKKYPKLESEFVYGDYKVYDVRKMIAKSEQEIGKATAKYFFYSNIMNFFKTEITLANGEIRKRPLIETNGETGEIVWDKGRDFATVRKVLSMPQVNIVKKTEVQTGGFSKESILPKRNSDKLIARKKDWDPKKYGGFDSPTVAYSVLVVAKVEKGKSKKLKSVKELLGITIMERSSFEKNPIDFLEAKGYKEVKKDLIIKLPKYSLFELENGRKRMLASAGELQKGNELALPSKYVNFLYLASHYEKLKGSPEDNEQKQLFVEQHKHYLDEIIEQISEFSKRVILADANLDKVLSAYNKHRDKPIREQAENIIHLFTLTNLGAPAAFKYFDTTIDRKRYTSTKEVLDATLIHQSITGLYETRIDLSQLGGDGGGGGGGLDDEYRLYSPLVKPDQNIQFWLEQFPQAWAETAGMGLAKQVPPQVIQLKASATPVSVRQYPLSKEAQEGIRPHVQRLIQQGILVPVQSPWNTPLLPVRKPGTNDYRPVQDLREVNKRVQDIHPTVPNPYNLLCALPPQRSWYTVLDLKDAFFCLRLHPTSQPLFAFEWRDPGTGRTGQLTWTRLPQGFKNSPTIFNEALHRDLANFRIQHPQVTLLQYVDDLLLAGATKQDCLEGTKALLLELSDLGYRASAKKAQICRREVTYLGYSLRDGQRWLTEARKKTVVQIPAPTTAKQVREFLGKAGFCRLFIPGFATLAAPLYPLTKPKGEFSWAPEHQKAFDAIKKALLSAPALALPDVTKPFTLYVDERKGVARGVLTQTLGPWRRPVAYLSKKLDPVASGWPVCLKAIAAVAILVKDADKLTLGQNITVIAPHALENIVRQPPDRWMTNARMTHYQSLLLTERVTFAPPAALNPATLLPEETDEPVTHDCHQLLIEETGVRKDLTDIPLTGEVLTWFTDGSSYVVEGKRMAGAAVVDGTRTIWASSLPEGTSAQKAELMALTQALRLAEGKSINIYTDSRYAFATAHVHGAIYKQRGWLTSAGREIKNKEEILSLLEALHLPKRLAIIHCPGHQKAKDPISRGNQMADRVAKQAAQGVNLLPAGKRTADGSEFEKRTADGSEFESPKKKAKVE

SEQ ID NO: 21542 - protein, 2088 aa, synthetic construct
MPAAKRVKLDGGDKKYSIGLDIGTNSVGWAVITDEYKVPSKKFKVLGNTDRHSIKKNLIGALLFDSGETAEATRLKRTARRRYTRRKNRICYLQEIFSNEMAKVDDSFFHRLEESFLVEEDKKHERHPIFGNIVDEVAYHEKYPTIYHLRKKLVDSTDKADLRLIYLALAHMIKFRGHFLIEGDLNPDNSDVDKLFIQLVQTYNQLFEENPINASGVDAKAILSARLSKSRRLENLIAQLPGEKKNGLFGNLIALSLGLTPNFKSNFDLAEDAKLQLSKDTYDDDLDNLLAQIGDQYADLFLAAKNLSDAILLSDILRVNTEITKAPLSASMIKRYDEHHQDLTLLKALVRQQLPEKYKEIFFDQSKNGYAGYIDGGASQEEFYKFIKPILEKMDGTEELLVKLNREDLLRKQRTFDNGSIPHQIHLGELHAILRRQEDFYPFLKDNREKIEKILTFRIPYYVGPLARGNSRFAWMTRKSEETITPWNFEEVVDKGASAQSFIERMTNFDKNLPNEKVLPKHSLLYEYFTVYNELTKVKYVTEGMRKPAFLSGEQKKAIVDLLFKTNRKVTVKQLKEDYFKKIECFDSVEISGVEDRFNASLGTYHDLLKIIKDKDFLDNEENEDILEDIVLTLTLFEDREMIEERLKTYAHLFDDKVMKQLKRRRYTGWGRLSRKLINGIRDKQSGKTILDFLKSDGFANRNFMQLIHDDSLTFKEDIQKAQVSGQGDSLHEHIANLAGSPAIKKGILQTVKVVDELVKVMGRHKPENIVIEMARENQTTQKGQKNSRERMKRIEEGIKELGSQILKEHPVENTQLQNEKLYLYYLQNGRDMYVDQELDINRLSDYDVDHIVPQSFLKDDSIDNKVLTRSDKARGKSDNVPSEEVVKKMKNYWRQLLNAKLITQRKFDNLTKAERGGLSELDKAGFIKRQLVETRQITKHVAQILDSRMNTKYDENDKLIREVKVITLKSKLVSDFRKDFQFYKVREINNYHHAHDAYLNAVVGTALIKKYPKLESEFVYGDYKVYDVRKMIAKSEQEIGKATAKYFFYSNIMNFFKTEITLANGEIRKRPLIETNGETGEIVWDKGRDFATVRKVLSMPQVNIVKKTEVQTGGFSKESILPKRNSDKLIARKKDWDPKKYGGFDSPTVAYSVLVVAKVEKGKSKKLKSVKELLGITIMERSSFEKNPIDFLEAKGYKEVKKDLIIKLPKYSLFELENGRKRMLASAGELQKGNELALPSKYVNFLYLASHYEKLKGSPEDNEQKQLFVEQHKHYLDEIIEQISEFSKRVILADANLDKVLSAYNKHRDKPIREQAENIIHLFTLTNLGAPAAFKYFDTTIDRKRYTSTKEVLDATLIHQSITGLYETRIDLSQLGGDGGEAAAKPAPGGSGGLDDEYRLYSPLVKPDQNIQFWLEQFPQAWAETAGMGLAKQVPPQVIQLKASATPVSVRQYPLSKEAQEGIRPHVQRLIQQGILVPVQSPWNTPLLPVRKPGTNDYRPVQDLREVNKRVQDIHPTVPNPYNLLCALPPQRSWYTVLDLKDAFFCLRLHPTSQPLFAFEWRDPGTGRTGQLTWTRLPQGFKNSPTIFNEALHRDLANFRIQHPQVTLLQYVDDLLLAGATKQDCLEGTKALLLELSDLGYRASAKKAQICRREVTYLGYSLRDGQRWLTEARKKTVVQIPAPTTAKQVREFLGKAGFCRLFIPGFATLAAPLYPLTKPKGEFSWAPEHQKAFDAIKKALLSAPALALPDVTKPFTLYVDERKGVARGVLTQTLGPWRRPVAYLSKKLDPVASGWPVCLKAIAAVAILVKDADKLTLGQNITVIAPHALENIVRQPPDRWMTNARMTHYQSLLLTERVTFAPPAALNPATLLPEETDEPVTHDCHQLLIEETGVRKDLTDIPLTGEVLTWFTDGSSYVVEGKRMAGAAVVDGTRTIWASSLPEGTSAQKAELMALTQALRLAEGKSINIYTDSRYAFATAHVHGAIYKQRGWLTSAGREIKNKEEILSLLEALHLPKRLAIIHCPGHQKAKDPISRGNQMADRVAKQAAQGVNLLPAGKRTADGSEFEKRTADGSEFESPKKKAKVE

SEQ ID NO: 21543 - protein, 2088 aa, synthetic construct; identical to SEQ ID NO: 94

SEQ ID NO: 21544 - protein, 2086 aa, synthetic construct; identical to SEQ ID NO: 60

SEQ ID NO: 21545 - protein, 2088 aa, synthetic construct
MPAAKRVKLDGGDKKYSIGLDIGTNSVGWAVITDEYKVPSKKFKVLGNTDRHSIKKNLIGALLFDSGETAEATRLKRTARRRYTRRKNRICYLQEIFSNEMAKVDDSFFHRLEESFLVEEDKKHERHPIFGNIVDEVAYHEKYPTIYHLRKKLVDSTDKADLRLIYLALAHMIKFRGHFLIEGDLNPDNSDVDKLFIQLVQTYNQLFEENPINASGVDAKAILSARLSKSRRLENLIAQLPGEKKNGLFGNLIALSLGLTPNFKSNFDLAEDAKLQLSKDTYDDDLDNLLAQIGDQYADLFLAAKNLSDAILLSDILRVNTEITKAPLSASMIKRYDEHHQDLTLLKALVRQQLPEKYKEIFFDQSKNGYAGYIDGGASQEEFYKFIKPILEKMDGTEELLVKLNREDLLRKQRTFDNGSIPHQIHLGELHAILRRQEDFYPFLKDNREKIEKILTFRIPYYVGPLARGNSRFAWMTRKSEETITPWNFEEVVDKGASAQSFIERMTNFDKNLPNEKVLPKHSLLYEYFTVYNELTKVKYVTEGMRKPAFLSGEQKKAIVDLLFKTNRKVTVKQLKEDYFKKIECFDSVEISGVEDRFNASLGTYHDLLKIIKDKDFLDNEENEDILEDIVLTLTLFEDREMIEERLKTYAHLFDDKVMKQLKRRRYTGWGRLSRKLINGIRDKQSGKTILDFLKSDGFANRNFMQLIHDDSLTFKEDIQKAQVSGQGDSLHEHIANLAGSPAIKKGILQTVKVVDELVKVMGRHKPENIVIEMARENQTTQKGQKNSRERMKRIEEGIKELGSQILKEHPVENTQLQNEKLYLYYLQNGRDMYVDQELDINRLSDYDVDHIVPQSFLKDDSIDNKVLTRSDKARGKSDNVPSEEVVKKMKNYWRQLLNAKLITQRKFDNLTKAERGGLSELDKAGFIKRQLVETRQITKHVAQILDSRMNTKYDENDKLIREVKVITLKSKLVSDFRKDFQFYKVREINNYHHAHDAYLNAVVGTALIKKYPKLESEFVYGDYKVYDVRKMIAKSEQEIGKATAKYFFYSNIMNFFKTEITLANGEIRKRPLIETNGETGEIVWDKGRDFATVRKVLSMPQVNIVKKTEVQTGGFSKESILPKRNSDKLIARKKDWDPKKYGGFDSPTVAYSVLVVAKVEKGKSKKLKSVKELLGITIMERSSFEKNPIDFLEAKGYKEVKKDLIIKLPKYSLFELENGRKRMLASAGELQKGNELALPSKYVNFLYLASHYEKLKGSPEDNEQKQLFVEQHKHYLDEIIEQISEFSKRVILADANLDKVLSAYNKHRDKPIREQAENIIHLFTLTNLGAPAAFKYFDTTIDRKRYTSTKEVLDATLIHQSITGLYETRIDLSQLGGDGGGGSEAAAKGGGGGLDDEYRLYSPLVKPDQNIQFWLEQFPQAWAETAGMGLAKQVPPQVIQLKASATPVSVRQYPLSKEAQEGIRPHVQRLIQQGILVPVQSPWNTPLLPVRKPGTNDYRPVQDLREVNKRVQDIHPTVPNPYNLLCALPPQRSWYTVLDLKDAFFCLRLHPTSQPLFAFEWRDPGTGRTGQLTWTRLPQGFKNSPTIFNEALHRDLANFRIQHPQVTLLQYVDDLLLAGATKQDCLEGTKALLLELSDLGYRASAKKAQICRREVTYLGYSLRDGQRWLTEARKKTVVQIPAPTTAKQVREFLGKAGFCRLFIPGFATLAAPLYPLTKPKGEFSWAPEHQKAFDAIKKALLSAPALALPDVTKPFTLYVDERKGVARGVLTQTLGPWRRPVAYLSKKLDPVASGWPVCLKAIAAVAILVKDADKLTLGQNITVIAPHALENIVRQPPDRWMTNARMTHYQSLLLTERVTFAPPAALNPATLLPEETDEPVTHDCHQLLIEETGVRKDLTDIPLTGEVLTWFTDGSSYVVEGKRMAGAAVVDGTRTIWASSLPEGTSAQKAELMALTQALRLAEGKSINIYTDSRYAFATAHVHGAIYKQRGWLTSAGREIKNKEEILSLLEALHLPKRLAIIHCPGHQKAKDPISRGNQMADRVAKQAAQGVNLLPAGKRTADGSEFEKRTADGSEFESPKKKAKVE

SEQ ID NO: 21546 - protein, 2086 aa, synthetic construct; identical to SEQ ID NO: 82

SEQ ID NO: 21547 - protein, 2083 aa, synthetic construct
MPAAKRVKLDGGDKKYSIGLDIGTNSVGWAVITDEYKVPSKKFKVLGNTDRHSIKKNLIGALLFDSGETAEATRLKRTARRRYTRRKNRICYLQEIFSNEMAKVDDSFFHRLEESFLVEEDKKHERHPIFGNIVDEVAYHEKYPTIYHLRKKLVDSTDKADLRLIYLALAHMIKFRGHFLIEGDLNPDNSDVDKLFIQLVQTYNQLFEENPINASGVDAKAILSARLSKSRRLENLIAQLPGEKKNGLFGNLIALSLGLTPNFKSNFDLAEDAKLQLSKDTYDDDLDNLLAQIGDQYADLFLAAKNLSDAILLSDILRVNTEITKAPLSASMIKRYDEHHQDLTLLKALVRQQLPEKYKEIFFDQSKNGYAGYIDGGASQEEFYKFIKPILEKMDGTEELLVKLNREDLLRKQRTFDNGSIPHQIHLGELHAILRRQEDFYPFLKDNREKIEKILTFRIPYYVGPLARGNSRFAWMTRKSEETITPWNFEEVVDKGASAQSFIERMTNFDKNLPNEKVLPKHSLLYEYFTVYNELTKVKYVTEGMRKPAFLSGEQKKAIVDLLFKTNRKVTVKQLKEDYFKKIECFDSVEISGVEDRFNASLGTYHDLLKIIKDKDFLDNEENEDILEDIVLTLTLFEDREMIEERLKTYAHLFDDKVMKQLKRRRYTGWGRLSRKLINGIRDKQSGKTILDFLKSDGFANRNFMQLIHDDSLTFKEDIQKAQVSGQGDSLHEHIANLAGSPAIKKGILQTVKVVDELVKVMGRHKPENIVIEMARENQTTQKGQKNSRERMKRIEEGIKELGSQILKEHPVENTQLQNEKLYLYYLQNGRDMYVDQELDINRLSDYDVDHIVPQSFLKDDSIDNKVLTRSDKARGKSDNVPSEEVVKKMKNYWRQLLNAKLITQRKFDNLTKAERGGLSELDKAGFIKRQLVETRQITKHVAQILDSRMNTKYDENDKLIREVKVITLKSKLVSDFRKDFQFYKVREINNYHHAHDAYLNAVVGTALIKKYPKLESEFVYGDYKVYDVRKMIAKSEQEIGKATAKYFFYSNIMNFFKTEITLANGEIRKRPLIETNGETGEIVWDKGRDFATVRKVLSMPQVNIVKKTEVQTGGFSKESILPKRNSDKLIARKKDWDPKKYGGFDSPTVAYSVLVVAKVEKGKSKKLKSVKELLGITIMERSSFEKNPIDFLEAKGYKEVKKDLIIKLPKYSLFELENGRKRMLASAGELQKGNELALPSKYVNFLYLASHYEKLKGSPEDNEQKQLFVEQHKHYLDEIIEQISEFSKRVILADANLDKVLSAYNKHRDKPIREQAENIIHLFTLTNLGAPAAFKYFDTTIDRKRYTSTKEVLDATLIHQSITGLYETRIDLSQLGGDGGPAPGGSGGLDDEYRLYSPLVKPDQNIQFWLEQFPQAWAETAGMGLAKQVPPQVIQLKASATPVSVRQYPLSKEAQEGIRPHVQRLIQQGILVPVQSPWNTPLLPVRKPGTNDYRPVQDLREVNKRVQDIHPTVPNPYNLLCALPPQRSWYTVLDLKDAFFCLRLHPTSQPLFAFEWRDPGTGRTGQLTWTRLPQGFKNSPTIFNEALHRDLANFRIQHPQVTLLQYVDDLLLAGATKQDCLEGTKALLLELSDLGYRASAKKAQICRREVTYLGYSLRDGQRWLTEARKKTVVQIPAPTTAKQVREFLGKAGFCRLFIPGFATLAAPLYPLTKPKGEFSWAPEHQKAFDAIKKALLSAPALALPDVTKPFTLYVDERKGVARGVLTQTLGPWRRPVAYLSKKLDPVASGWPVCLKAIAAVAILVKDADKLTLGQNITVIAPHALENIVRQPPDRWMTNARMTHYQSLLLTERVTFAPPAALNPATLLPEETDEPVTHDCHQLLIEETGVRKDLTDIPLTGEVLTWFTDGSSYVVEGKRMAGAAVVDGTRTIWASSLPEGTSAQKAELMALTQALRLAEGKSINIYTDSRYAFATAHVHGAIYKQRGWLTSAGREIKNKEEILSLLEALHLPKRLAIIHCPGHQKAKDPISRGNQMADRVAKQAAQGVNLLPAGKRTADGSEFEKRTADGSEFESPKKKAKVE

SEQ ID NO: 21548 - protein, 2083 aa, synthetic construct; identical to SEQ ID NO: 59

SEQ ID NO: 21549 - protein, 2088 aa, synthetic construct
MPAAKRVKLDGGDKKYSIGLDIGTNSVGWAVITDEYKVPSKKFKVLGNTDRHSIKKNLIGALLFDSGETAEATRLKRTARRRYTRRKNRICYLQEIFSNEMAKVDDSFFHRLEESFLVEEDKKHERHPIFGNIVDEVAYHEKYPTIYHLRKKLVDSTDKADLRLIYLALAHMIKFRGHFLIEGDLNPDNSDVDKLFIQLVQTYNQLFEENPINASGVDAKAILSARLSKSRRLENLIAQLPGEKKNGLFGNLIALSLGLTPNFKSNFDLAEDAKLQLSKDTYDDDLDNLLAQIGDQYADLFLAAKNLSDAILLSDILRVNTEITKAPLSASMIKRYDEHHQDLTLLKALVRQQLPEKYKEIFFDQSKNGYAGYIDGGASQEEFYKFIKPILEKMDGTEELLVKLNREDLLRKQRTFDNGSIPHQIHLGELHAILRRQEDFYPFLKDNREKIEKILTFRIPYYVGPLARGNSRFAWMTRKSEETITPWNFEEVVDKGASAQSFIERMTNFDKNLPNEKVLPKHSLLYEYFTVYNELTKVKYVTEGMRKPAFLSGEQKKAIVDLLFKTNRKVTVKQLKEDYFKKIECFDSVEISGVEDRFNASLGTYHDLLKIIKDKDFLDNEENEDILEDIVLTLTLFEDREMIEERLKTYAHLFDDKVMKQLKRRRYTGWGRLSRKLINGIRDKQSGKTILDFLKSDGFANRNFMQLIHDDSLTFKEDIQKAQVSGQGDSLHEHIANLAGSPAIKKGILQTVKVVDELVKVMGRHKPENIVIEMARENQTTQKGQKNSRERMKRIEEGIKELGSQILKEHPVENTQLQNEKLYLYYLQNGRDMYVDQELDINRLSDYDVDHIVPQSFLKDDSIDNKVLTRSDKARGKSDNVPSEEVVKKMKNYWRQLLNAKLITQRKFDNLTKAERGGLSELDKAGFIKRQLVETRQITKHVAQILDSRMNTKYDENDKLIREVKVITLKSKLVSDFRKDFQFYKVREINNYHHAHDAYLNAVVGTALIKKYPKLESEFVYGDYKVYDVRKMIAKSEQEIGKATAKYFFYSNIMNFFKTEITLANGEIRKRPLIETNGETGEIVWDKGRDFATVRKVLSMPQVNIVKKTEVQTGGFSKESILPKRNSDKLIARKKDWDPKKYGGFDSPTVAYSVLVVAKVEKGKSKKLKSVKELLGITIMERSSFEKNPIDFLEAKGYKEVKKDLIIKLPKYSLFELENGRKRMLASAGELQKGNELALPSKYVNFLYLASHYEKLKGSPEDNEQKQLFVEQHKHYLDEIIEQISEFSKRVILADANLDKVLSAYNKHRDKPIREQAENIIHLFTLTNLGAPAAFKYFDTTIDRKRYTSTKEVLDATLIHQSITGLYETRIDLSQLGGDGGGSSGGSEAAAKGGLDDEYRLYSPLVKPDQNIQFWLEQFPQAWAETAGMGLAKQVPPQVIQLKASATPVSVRQYPLSKEAQEGIRPHVQRLIQQGILVPVQSPWNTPLLPVRKPGTNDYRPVQDLREVNKRVQDIHPTVPNPYNLLCALPPQRSWYTVLDLKDAFFCLRLHPTSQPLFAFEWRDPGTGRTGQLTWTRLPQGFKNSPTIFNEALHRDLANFRIQHPQVTLLQYVDDLLLAGATKQDCLEGTKALLLELSDLGYRASAKKAQICRREVTYLGYSLRDGQRWLTEARKKTVVQIPAPTTAKQVREFLGKAGFCRLFIPGFATLAAPLYPLTKPKGEFSWAPEHQKAFDAIKKALLSAPALALPDVTKPFTLYVDERKGVARGVLTQTLGPWRRPVAYLSKKLDPVASGWPVCLKAIAAVAILVKDADKLTLGQNITVIAPHALENIVRQPPDRWMTNARMTHYQSLLLTERVTFAPPAALNPATLLPEETDEPVTHDCHQLLIEETGVRKDLTDIPLTGEVLTWFTDGSSYVVEGKRMAGAAVVDGTRTIWASSLPEGTSAQKAELMALTQALRLAEGKSINIYTDSRYAFATAHVHGAIYKQRGWLTSAGREIKNKEEILSLLEALHLPKRLAIIHCPGHQKAKDPISRGNQMADRVAKQAAQGVNLLPAGKRTADGSEFEKRTADGSEFESPKKKAKVE

SEQ ID NO: 21550 - protein, 2088 aa, synthetic construct; identical to SEQ ID NO: 86

SEQ ID NO: 21551 - protein, 2107 aa, synthetic construct
MPAAKRVKLDGGDKKYSIGLDIGTNSVGWAVITDEYKVPSKKFKVLGNTDRHSIKKNLIGALLFDSGETAEATRLKRTARRRYTRRKNRICYLQEIFSNEMAKVDDSFFHRLEESFLVEEDKKHERHPIFGNIVDEVAYHEKYPTIYHLRKKLVDSTDKADLRLIYLALAHMIKFRGHFLIEGDLNPDNSDVDKLFIQLVQTYNQLFEENPINASGVDAKAILSARLSKSRRLENLIAQLPGEKKNGLFGNLIALSLGLTPNFKSNFDLAEDAKLQLSKDTYDDDLDNLLAQIGDQYADLFLAAKNLSDAILLSDILRVNTEITKAPLSASMIKRYDEHHQDLTLLKALVRQQLPEKYKEIFFDQSKNGYAGYIDGGASQEEFYKFIKPILEKMDGTEELLVKLNREDLLRKQRTFDNGSIPHQIHLGELHAILRRQEDFYPFLKDNREKIEKILTFRIPYYVGPLARGNSRFAWMTRKSEETITPWNFEEVVDKGASAQSFIERMTNFDKNLPNEKVLPKHSLLYEYFTVYNELTKVKYVTEGMRKPAFLSGEQKKAIVDLLFKTNRKVTVKQLKEDYFKKIECFDSVEISGVEDRFNASLGTYHDLLKIIKDKDFLDNEENEDILEDIVLTLTLFEDREMIEERLKTYAHLFDDKVMKQLKRRRYTGWGRLSRKLINGIRDKQSGKTILDFLKSDGFANRNFMQLIHDDSLTFKEDIQKAQVSGQGDSLHEHIANLAGSPAIKKGILQTVKVVDELVKVMGRHKPENIVIEMARENQTTQKGQKNSRERMKRIEEGIKELGSQILKEHPVENTQLQNEKLYLYYLQNGRDMYVDQELDINRLSDYDVDHIVPQSFLKDDSIDNKVLTRSDKARGKSDNVPSEEVVKKMKNYWRQLLNAKLITQRKFDNLTKAERGGLSELDKAGFIKRQLVETRQITKHVAQILDSRMNTKYDENDKLIREVKVITLKSKLVSDFRKDFQFYKVREINNYHHAHDAYLNAVVGTALIKKYPKLESEFVYGDYKVYDVRKMIAKSEQEIGKATAKYFFYSNIMNFFKTEITLANGEIRKRPLIETNGETGEIVWDKGRDFATVRKVLSMPQVNIVKKTEVQTGGFSKESILPKRNSDKLIARKKDWDPKKYGGFDSPTVAYSVLVVAKVEKGKSKKLKSVKELLGITIMERSSFEKNPIDFLEAKGYKEVKKDLIIKLPKYSLFELENGRKRMLASAGELQKGNELALPSKYVNFLYLASHYEKLKGSPEDNEQKQLFVEQHKHYLDEIIEQISEFSKRVILADANLDKVLSAYNKHRDKPIREQAENIIHLFTLTNLGAPAAFKYFDTTIDRKRYTSTKEVLDATLIHQSITGLYETRIDLSQLGGDGGGGGGSGGGGSGGGGSGGGGSGGGGSGGGGSGGLDDEYRLYSPLVKPDQNIQFWLEQFPQAWAETAGMGLAKQVPPQVIQLKASATPVSVRQYPLSKEAQEGIRPHVQRLIQQGILVPVQSPWNTPLLPVRKPGTNDYRPVQDLREVNKRVQDIHPTVPNPYNLLCALPPQRSWYTVLDLKDAFFCLRLHPTSQPLFAFEWRDPGTGRTGQLTWTRLPQGFKNSPTIFNEALHRDLANFRIQHPQVTLLQYVDDLLLAGATKQDCLEGTKALLLELSDLGYRASAKKAQICRREVTYLGYSLRDGQRWLTEARKKTVVQIPAPTTAKQVREFLGKAGFCRLFIPGFATLAAPLYPLTKPKGEFSWAPEHQKAFDAIKKALLSAPALALPDVTKPFTLYVDERKGVARGVLTQTLGPWRRPVAYLSKKLDPVASGWPVCLKAIAAVAILVKDADKLTLGQNITVIAPHALENIVRQPPDRWMTNARMTHYQSLLLTERVTFAPPAALNPATLLPEETDEPVTHDCHQLLIEETGVRKDLTDIPLTGEVLTWFTDGSSYVVEGKRMAGAAVVDGTRTIWASSLPEGTSAQKAELMALTQALRLAEGKSINIYTDSRYAFATAHVHGAIYKQRGWLTSAGREIKNKEEILSLLEALHLPKRLAIIHCPGHQKAKDPISRGNQMADRVAKQAAQGVNLLPAGKRTADGSEFEKRTADGSEFESPKKKAKVE

SEQ ID NO: 21552 - protein, 2086 aa, synthetic construct; identical to SEQ ID NO: 64

SEQ ID NO: 21553 - protein, 2088 aa, synthetic construct
MPAAKRVKLDGGDKKYSIGLDIGTNSVGWAVITDEYKVPSKKFKVLGNTDRHSIKKNLIGALLFDSGETAEATRLKRTARRRYTRRKNRICYLQEIFSNEMAKVDDSFFHRLEESFLVEEDKKHERHPIFGNIVDEVAYHEKYPTIYHLRKKLVDSTDKADLRLIYLALAHMIKFRGHFLIEGDLNPDNSDVDKLFIQLVQTYNQLFEENPINASGVDAKAILSARLSKSRRLENLIAQLPGEKKNGLFGNLIALSLGLTPNFKSNFDLAEDAKLQLSKDTYDDDLDNLLAQIGDQYADLFLAAKNLSDAILLSDILRVNTEITKAPLSASMIKRYDEHHQDLTLLKALVRQQLPEKYKEIFFDQSKNGYAGYIDGGASQEEFYKFIKPILEKMDGTEELLVKLNREDLLRKQRTFDNGSIPHQIHLGELHAILRRQEDFYPFLKDNREKIEKILTFRIPYYVGPLARGNSRFAWMTRKSEETITPWNFEEVVDKGASAQSFIERMTNFDKNLPNEKVLPKHSLLYEYFTVYNELTKVKYVTEGMRKPAFLSGEQKKAIVDLLFKTNRKVTVKQLKEDYFKKIECFDSVEISGVEDRFNASLGTYHDLLKIIKDKDFLDNEENEDILEDIVLTLTLFEDREMIEERLKTYAHLFDDKVMKQLKRRRYTGWGRLSRKLINGIRDKQSGKTILDFLKSDGFANRNFMQLIHDDSLTFKEDIQKAQVSGQGDSLHEHIANLAGSPAIKKGILQTVKVVDELVKVMGRHKPENIVIEMARENQTTQKGQKNSRERMKRIEEGIKELGSQILKEHPVENTQLQNEKLYLYYLQNGRDMYVDQELDINRLSDYDVDHIVPQSFLKDDSIDNKVLTRSDKARGKSDNVPSEEVVKKMKNYWRQLLNAKLITQRKFDNLTKAERGGLSELDKAGFIKRQLVETRQITKHVAQILDSRMNTKYDENDKLIREVKVITLKSKLVSDFRKDFQFYKVREINNYHHAHDAYLNAVVGTALIKKYPKLESEFVYGDYKVYDVRKMIAKSEQEIGKATAKYFFYSNIMNFFKTEITLANGEIRKRPLIETNGETGEIVWDKGRDFATVRKVLSMPQVNIVKKTEVQTGGFSKESILPKRNSDKLIARKKDWDPKKYGGFDSPTVAYSVLVVAKVEKGKSKKLKSVKELLGITIMERSSFEKNPIDFLEAKGYKEVKKDLIIKLPKYSLFELENGRKRMLASAGELQKGNELALPSKYVNFLYLASHYEKLKGSPEDNEQKQLFVEQHKHYLDEIIEQISEFSKRVILADANLDKVLSAYNKHRDKPIREQAENIIHLFTLTNLGAPAAFKYFDTTIDRKRYTSTKEVLDATLIHQSITGLYETRIDLSQLGGDGGGSSEAAAKGGSGGLDDEYRLYSPLVKPDQNIQFWLEQFPQAWAETAGMGLAKQVPPQVIQLKASATPVSVRQYPLSKEAQEGIRPHVQRLIQQGILVPVQSPWNTPLLPVRKPGTNDYRPVQDLREVNKRVQDIHPTVPNPYNLLCALPPQRSWYTVLDLKDAFFCLRLHPTSQPLFAFEWRDPGTGRTGQLTWTRLPQGFKNSPTIFNEALHRDLANFRIQHPQVTLLQYVDDLLLAGATKQDCLEGTKALLLELSDLGYRASAKKAQICRREVTYLGYSLRDGQRWLTEARKKTVVQIPAPTTAKQVREFLGKAGFCRLFIPGFATLAAPLYPLTKPKGEFSWAPEHQKAFDAIKKALLSAPALALPDVTKPFTLYVDERKGVARGVLTQTLGPWRRPVAYLSKKLDPVASGWPVCLKAIAAVAILVKDADKLTLGQNITVIAPHALENIVRQPPDRWMTNARMTHYQSLLLTERVTFAPPAALNPATLLPEETDEPVTHDCHQLLIEETGVRKDLTDIPLTGEVLTWFTDGSSYVVEGKRMAGAAVVDGTRTIWASSLPEGTSAQKAELMALTQALRLAEGKSINIYTDSRYAFATAHVHGAIYKQRGWLTSAGREIKNKEEILSLLEALHLPKRLAIIHCPGHQKAKDPISRGNQMADRVAKQAAQGVNLLPAGKRTADGSEFEKRTADGSEFESPKKKAKVE

SEQ ID NO: 21554 - protein, 2083 aa, synthetic construct
MPAAKRVKLDGGDKKYSIGLDIGTNSVGWAVITDEYKVPSKKFKVLGNTDRHSIKKNLIGALLFDSGETAEATRLKRTARRRYTRRKNRICYLQEIFSNEMAKVDDSFFHRLEESFLVEEDKKHERHPIFGNIVDEVAYHEKYPTIYHLRKKLVDSTDKADLRLIYLALAHMIKFRGHFLIEGDLNPDNSDVDKLFIQLVQTYNQLFEENPINASGVDAKAILSARLSKSRRLENLIAQLPGEKKNGLFGNLIALSLGLTPNFKSNFDLAEDAKLQLSKDTYDDDLDNLLAQIGDQYADLFLAAKNLSDAILLSDILRVNTEITKAPLSASMIKRYDEHHQDLTLLKALVRQQLPEKYKEIFFDQSKNGYAGYIDGGASQEEFYKFIKPILEKMDGTEELLVKLNREDLLRKQRTFDNGSIPHQIHLGELHAILRRQEDFYPFLKDNREKIEKILTFRIPYYVGPLARGNSRFAWMTRKSEETITPWNFEEVVDKGASAQSFIERMTNFDKNLPNEKVLPKHSLLYEYFTVYNELTKVKYVTEGMRKPAFLSGEQKKAIVDLLFKTNRKVTVKQLKEDYFKKIECFDSVEISGVEDRFNASLGTYHDLLKIIKDKDFLDNEENEDILEDIVLTLTLFEDREMIEERLKTYAHLFDDKVMKQLKRRRYTGWGRLSRKLINGIRDKQSGKTILDFLKSDGFANRNFMQLIHDDSLTFKEDIQKAQVSGQGDSLHEHIANLAGSPAIKKGILQTVKVVDELVKVMGRHKPENIVIEMARENQTTQKGQKNSRERMKRIEEGIKELGSQILKEHPVENTQLQNEKLYLYYLQNGRDMYVDQELDINRLSDYDVDHIVPQSFLKDDSIDNKVLTRSDKARGKSDNVPSEEVVKKMKNYWRQLLNAKLITQRKFDNLTKAERGGLSELDKAGFIKRQLVETRQITKHVAQILDSRMNTKYDENDKLIREVKVITLKSKLVSDFRKDFQFYKVREINNYHHAHDAYLNAVVGTALIKKYPKLESEFVYGDYKVYDVRKMIAKSEQEIGKATAKYFFYSNIMNFFKTEITLANGEIRKRPLIETNGETGEIVWDKGRDFATVRKVLSMPQVNIVKKTEVQTGGFSKESILPKRNSDKLIARKKDWDPKKYGGFDSPTVAYSVLVVAKVEKGKSKKLKSVKELLGITIMERSSFEKNPIDFLEAKGYKEVKKDLIIKLPKYSLFELENGRKRMLASAGELQKGNELALPSKYVNFLYLASHYEKLKGSPEDNEQKQLFVEQHKHYLDEIIEQISEFSKRVILADANLDKVLSAYNKHRDKPIREQAENIIHLFTLTNLGAPAAFKYFDTTIDRKRYTSTKEVLDATLIHQSITGLYETRIDLSQLGGDGGGGSGGSGGLDDEYRLYSPLVKPDQNIQFWLEQFPQAWAETAGMGLAKQVPPQVIQLKASATPVSVRQYPLSKEAQEGIRPHVQRLIQQGILVPVQSPWNTPLLPVRKPGTNDYRPVQDLREVNKRVQDIHPTVPNPYNLLCALPPQRSWYTVLDLKDAFFCLRLHPTSQPLFAFEWRDPGTGRTGQLTWTRLPQGFKNSPTIFNEALHRDLANFRIQHPQVTLLQYVDDLLLAGATKQDCLEGTKALLLELSDLGYRASAKKAQICRREVTYLGYSLRDGQRWLTEARKKTVVQIPAPTTAKQVREFLGKAGFCRLFIPGFATLAAPLYPLTKPKGEFSWAPEHQKAFDAIKKALLSAPALALPDVTKPFTLYVDERKGVARGVLTQTLGPWRRPVAYLSKKLDPVASGWPVCLKAIAAVAILVKDADKLTLGQNITVIAPHALENIVRQPPDRWMTNARMTHYQSLLLTERVTFAPPAALNPATLLPEETDEPVTHDCHQLLIEETGVRKDLTDIPLTGEVLTWFTDGSSYVVEGKRMAGAAVVDGTRTIWASSLPEGTSAQKAELMALTQALRLAEGKSINIYTDSRYAFATAHVHGAIYKQRGWLTSAGREIKNKEEILSLLEALHLPKRLAIIHCPGHQKAKDPISRGNQMADRVAKQAAQGVNLLPAGKRTADGSEFEKRTADGSEFESPKKKAKVE

SEQ ID NO: 21555 - protein, 2088 aa, synthetic construct; identical to SEQ ID NO: 93

SEQ ID NO: 21556 - protein, 2083 aa, synthetic construct; identical to SEQ ID NO: 81

SEQ ID NO: 21557 - protein, 2080 aa, synthetic construct
MPAAKRVKLDGGDKKYSIGLDIGTNSVGWAVITDEYKVPSKKFKVLGNTDRHSIKKNLIGALLFDSGETAEATRLKRTARRRYTRRKNRICYLQEIFSNEMAKVDDSFFHRLEESFLVEEDKKHERHPIFGNIVDEVAYHEKYPTIYHLRKKLVDSTDKADLRLIYLALAHMIKFRGHFLIEGDLNPDNSDVDKLFIQLVQTYNQLFEENPINASGVDAKAILSARLSKSRRLENLIAQLPGEKKNGLFGNLIALSLGLTPNFKSNFDLAEDAKLQLSKDTYDDDLDNLLAQIGDQYADLFLAAKNLSDAILLSDILRVNTEITKAPLSASMIKRYDEHHQDLTLLKALVRQQLPEKYKEIFFDQSKNGYAGYIDGGASQEEFYKFIKPILEKMDGTEELLVKLNREDLLRKQRTFDNGSIPHQIHLGELHAILRRQEDFYPFLKDNREKIEKILTFRIPYYVGPLARGNSRFAWMTRKSEETITPWNFEEVVDKGASAQSFIERMTNFDKNLPNEKVLPKHSLLYEYFTVYNELTKVKYVTEGMRKPAFLSGEQKKAIVDLLFKTNRKVTVKQLKEDYFKKIECFDSVEISGVEDRFNASLGTYHDLLKIIKDKDFLDNEENEDILEDIVLTLTLFEDREMIEERLKTYAHLFDDKVMKQLKRRRYTGWGRLSRKLINGIRDKQSGKTILDFLKSDGFANRNFMQLIHDDSLTFKEDIQKAQVSGQGDSLHEHIANLAGSPAIKKGILQTVKVVDELVKVMGRHKPENIVIEMARENQTTQKGQKNSRERMKRIEEGIKELGSQILKEHPVENTQLQNEKLYLYYLQNGRDMYVDQELDINRLSDYDVDHIVPQSFLKDDSIDNKVLTRSDKARGKSDNVPSEEVVKKMKNYWRQLLNAKLITQRKFDNLTKAERGGLSELDKAGFIKRQLVETRQITKHVAQILDSRMNTKYDENDKLIREVKVITLKSKLVSDFRKDFQFYKVREINNYHHAHDAYLNAVVGTALIKKYPKLESEFVYGDYKVYDVRKMIAKSEQEIGKATAKYFFYSNIMNFFKTEITLANGEIRKRPLIETNGETGEIVWDKGRDFATVRKVLSMPQVNIVKKTEVQTGGFSKESILPKRNSDKLIARKKDWDPKKYGGFDSPTVAYSVLVVAKVEKGKSKKLKSVKELLGITIMERSSFEKNPIDFLEAKGYKEVKKDLIIKLPKYSLFELENGRKRMLASAGELQKGNELALPSKYVNFLYLASHYEKLKGSPEDNEQKQLFVEQHKHYLDEIIEQISEFSKRVILADANLDKVLSAYNKHRDKPIREQAENIIHLFTLTNLGAPAAFKYFDTTIDRKRYTSTKEVLDATLIHQSITGLYETRIDLSQLGGDGGGGSGGLDDEYRLYSPLVKPDQNIQFWLEQFPQAWAETAGMGLAKQVPPQVIQLKASATPVSVRQYPLSKEAQEGIRPHVQRLIQQGILVPVQSPWNTPLLPVRKPGTNDYRPVQDLREVNKRVQDIHPTVPNPYNLLCALPPQRSWYTVLDLKDAFFCLRLHPTSQPLFAFEWRDPGTGRTGQLTWTRLPQGFKNSPTIFNEALHRDLANFRIQHPQVTLLQYVDDLLLAGATKQDCLEGTKALLLELSDLGYRASAKKAQICRREVTYLGYSLRDGQRWLTEARKKTVVQIPAPTTAKQVREFLGKAGFCRLFIPGFATLAAPLYPLTKPKGEFSWAPEHQKAFDAIKKALLSAPALALPDVTKPFTLYVDERKGVARGVLTQTLGPWRRPVAYLSKKLDPVASGWPVCLKAIAAVAILVKDADKLTLGQNITVIAPHALENIVRQPPDRWMTNARMTHYQSLLLTERVTFAPPAALNPATLLPEETDEPVTHDCHQLLIEETGVRKDLTDIPLTGEVLTWFTDGSSYVVEGKRMAGAAVVDGTRTIWASSLPEGTSAQKAELMALTQALRLAEGKSINIYTDSRYAFATAHVHGAIYKQRGWLTSAGREIKNKEEILSLLEALHLPKRLAIIHCPGHQKAKDPISRGNQMADRVAKQAAQGVNLLPAGKRTADGSEFEKRTADGSEFESPKKKAKVE

SEQ ID NO: 21558 - protein, 2088 aa, synthetic construct; identical to SEQ ID NO: 92

SEQ ID NO: 21559 - protein, 2088 aa, synthetic construct; identical to SEQ ID NO: 53

SEQ ID NO: 21560 - protein, 2083 aa, synthetic construct; identical to SEQ ID NO: 79

SEQ ID NO: 21561 - protein, 2082 aa, synthetic construct
MPAAKRVKLDGGDKKYSIGLDIGTNSVGWAVITDEYKVPSKKFKVLGNTDRHSIKKNLIGALLFDSGETAEATRLKRTARRRYTRRKNRICYLQEIFSNEMAKVDDSFFHRLEESFLVEEDKKHERHPIFGNIVDEVAYHEKYPTIYHLRKKLVDSTDKADLRLIYLALAHMIKFRGHFLIEGDLNPDNSDVDKLFIQLVQTYNQLFEENPINASGVDAKAILSARLSKSRRLENLIAQLPGEKKNGLFGNLIALSLGLTPNFKSNFDLAEDAKLQLSKDTYDDDLDNLLAQIGDQYADLFLAAKNLSDAILLSDILRVNTEITKAPLSASMIKRYDEHHQDLTLLKALVRQQLPEKYKEIFFDQSKNGYAGYIDGGASQEEFYKFIKPILEKMDGTEELLVKLNREDLLRKQRTFDNGSIPHQIHLGELHAILRRQEDFYPFLKDNREKIEKILTFRIPYYVGPLARGNSRFAWMTRKSEETITPWNFEEVVDKGASAQSFIERMTNFDKNLPNEKVLPKHSLLYEYFTVYNELTKVKYVTEGMRKPAFLSGEQKKAIVDLLFKTNRKVTVKQLKEDYFKKIECFDSVEISGVEDRFNASLGTYHDLLKIIKDKDFLDNEENEDILEDIVLTLTLFEDREMIEERLKTYAHLFDDKVMKQLKRRRYTGWGRLSRKLINGIRDKQSGKTILDFLKSDGFANRNFMQLIHDDSLTFKEDIQKAQVSGQGDSLHEHIANLAGSPAIKKGILQTVKVVDELVKVMGRHKPENIVIEMARENQTTQKGQKNSRERMKRIEEGIKELGSQILKEHPVENTQLQNEKLYLYYLQNGRDMYVDQELDINRLSDYDVDHIVPQSFLKDDSIDNKVLTRSDKARGKSDNVPSEEVVKKMKNYWRQLLNAKLITQRKFDNLTKAERGGLSELDKAGFIKRQLVETRQITKHVAQILDSRMNTKYDENDKLIREVKVITLKSKLVSDFRKDFQFYKVREINNYHHAHDAYLNAVVGTALIKKYPKLESEFVYGDYKVYDVRKMIAKSEQEIGKATAKYFFYSNIMNFFKTEITLANGEIRKRPLIETNGETGEIVWDKGRDFATVRKVLSMPQVNIVKKTEVQTGGFSKESILPKRNSDKLIARKKDWDPKKYGGFDSPTVAYSVLVVAKVEKGKSKKLKSVKELLGITIMERSSFEKNPIDFLEAKGYKEVKKDLIIKLPKYSLFELENGRKRMLASAGELQKGNELALPSKYVNFLYLASHYEKLKGSPEDNEQKQLFVEQHKHYLDEIIEQISEFSKRVILADANLDKVLSAYNKHRDKPIREQAENIIHLFTLTNLGAPAAFKYFDTTIDRKRYTSTKEVLDATLIHQSITGLYETRIDLSQLGGDGGPAPAPGGLDDEYRLYSPLVKPDQNIQFWLEQFPQAWAETAGMGLAKQVPPQVIQLKASATPVSVRQYPLSKEAQEGIRPHVQRLIQQGILVPVQSPWNTPLLPVRKPGTNDYRPVQDLREVNKRVQDIHPTVPNPYNLLCALPPQRSWYTVLDLKDAFFCLRLHPTSQPLFAFEWRDPGTGRTGQLTWTRLPQGFKNSPTIFNEALHRDLANFRIQHPQVTLLQYVDDLLLAGATKQDCLEGTKALLLELSDLGYRASAKKAQICRREVTYLGYSLRDGQRWLTEARKKTVVQIPAPTTAKQVREFLGKAGFCRLFIPGFATLAAPLYPLTKPKGEFSWAPEHQKAFDAIKKALLSAPALALPDVTKPFTLYVDERKGVARGVLTQTLGPWRRPVAYLSKKLDPVASGWPVCLKAIAAVAILVKDADKLTLGQNITVIAPHALENIVRQPPDRWMTNARMTHYQSLLLTERVTFAPPAALNPATLLPEETDEPVTHDCHQLLIEETGVRKDLTDIPLTGEVLTWFTDGSSYVVEGKRMAGAAVVDGTRTIWASSLPEGTSAQKAELMALTQALRLAEGKSINIYTDSRYAFATAHVHGAIYKQRGWLTSAGREIKNKEEILSLLEALHLPKRLAIIHCPGHQKAKDPISRGNQMADRVAKQAAQGVNLLPAGKRTADGSEFEKRTADGSEFESPKKKAKVE

SEQ ID NO: 21562 - protein, 2086 aa, synthetic construct
MPAAKRVKLDGGDKKYSIGLDIGTNSVGWAVITDEYKVPSKKFKVLGNTDRHSIKKNLIGALLFDSGETAEATRLKRTARRRYTRRKNRICYLQEIFSNEMAKVDDSFFHRLEESFLVEEDKKHERHPIFGNIVDEVAYHEKYPTIYHLRKKLVDSTDKADLRLIYLALAHMIKFRGHFLIEGDLNPDNSDVDKLFIQLVQTYNQLFEENPINASGVDAKAILSARLSKSRRLENLIAQLPGEKKNGLFGNLIALSLGLTPNFKSNFDLAEDAKLQLSKDTYDDDLDNLLAQIGDQYADLFLAAKNLSDAILLSDILRVNTEITKAPLSASMIKRYDEHHQDLTLLKALVRQQLPEKYKEIFFDQSKNGYAGYIDGGASQEEFYKFIKPILEKMDGTEELLVKLNREDLLRKQRTFDNGSIPHQIHLGELHAILRRQEDFYPFLKDNREKIEKILTFRIPYYVGPLARGNSRFAWMTRKSEETITPWNFEEVVDKGASAQSFIERMTNFDKNLPNEKVLPKHSLLYEYFTVYNELTKVKYVTEGMRKPAFLSGEQKKAIVDLLFKTNRKVTVKQLKEDYFKKIECFDSVEISGVEDRFNASLGTYHDLLKIIKDKDFLDNEENEDILEDIVLTLTLFEDREMIEERLKTYAHLFDDKVMKQLKRRRYTGWGRLSRKLINGIRDKQSGKTILDFLKSDGFANRNFMQLIHDDSLTFKEDIQKAQVSGQGDSLHEHIANLAGSPAIKKGILQTVKVVDELVKVMGRHKPENIVIEMARENQTTQKGQKNSRERMKRIEEGIKELGSQILKEHPVENTQLQNEKLYLYYLQNGRDMYVDQELDINRLSDYDVDHIVPQSFLKDDSIDNKVLTRSDKARGKSDNVPSEEVVKKMKNYWRQLLNAKLITQRKFDNLTKAERGGLSELDKAGFIKRQLVETRQITKHVAQILDSRMNTKYDENDKLIREVKVITLKSKLVSDFRKDFQFYKVREINNYHHAHDAYLNAVVGTALIKKYPKLESEFVYGDYKVYDVRKMIAKSEQEIGKATAKYFFYSNIMNFFKTEITLANGEIRKRPLIETNGETGEIVWDKGRDFATVRKVLSMPQVNIVKKTEVQTGGFSKESILPKRNSDKLIARKKDWDPKKYGGFDSPTVAYSVLVVAKVEKGKSKKLKSVKELLGITIMERSSFEKNPIDFLEAKGYKEVKKDLIIKLPKYSLFELENGRKRMLASAGELQKGNELALPSKYVNFLYLASHYEKLKGSPEDNEQKQLFVEQHKHYLDEIIEQISEFSKRVILADANLDKVLSAYNKHRDKPIREQAENIIHLFTLTNLGAPAAFKYFDTTIDRKRYTSTKEVLDATLIHQSITGLYETRIDLSQLGGDGGGGSPAPGSSGGLDDEYRLYSPLVKPDQNIQFWLEQFPQAWAETAGMGLAKQVPPQVIQLKASATPVSVRQYPLSKEAQEGIRPHVQRLIQQGILVPVQSPWNTPLLPVRKPGTNDYRPVQDLREVNKRVQDIHPTVPNPYNLLCALPPQRSWYTVLDLKDAFFCLRLHPTSQPLFAFEWRDPGTGRTGQLTWTRLPQGFKNSPTIFNEALHRDLANFRIQHPQVTLLQYVDDLLLAGATKQDCLEGTKALLLELSDLGYRASAKKAQICRREVTYLGYSLRDGQRWLTEARKKTVVQIPAPTTAKQVREFLGKAGFCRLFIPGFATLAAPLYPLTKPKGEFSWAPEHQKAFDAIKKALLSAPALALPDVTKPFTLYVDERKGVARGVLTQTLGPWRRPVAYLSKKLDPVASGWPVCLKAIAAVAILVKDADKLTLGQNITVIAPHALENIVRQPPDRWMTNARMTHYQSLLLTERVTFAPPAALNPATLLPEETDEPVTHDCHQLLIEETGVRKDLTDIPLTGEVLTWFTDGSSYVVEGKRMAGAAVVDGTRTIWASSLPEGTSAQKAELMALTQALRLAEGKSINIYTDSRYAFATAHVHGAIYKQRGWLTSAGREIKNKEEILSLLEALHLPKRLAIIHCPGHQKAKDPISRGNQMADRVAKQAAQGVNLLPAGKRTADGSEFEKRTADGSEFESPKKKAKVE

SEQ ID NO: 21563 - protein, 2086 aa, synthetic construct; identical to SEQ ID NO: 38

SEQ ID NO: 21564 - protein, 2080 aa, synthetic construct
MPAAKRVKLDGGDKKYSIGLDIGTNSVGWAVITDEYKVPSKKFKVLGNTDRHSIKKNLIGALLFDSGETAEATRLKRTARRRYTRRKNRICYLQEIFSNEMAKVDDSFFHRLEESFLVEEDKKHERHPIFGNIVDEVAYHEKYPTIYHLRKKLVDSTDKADLRLIYLALAHMIKFRGHFLIEGDLNPDNSDVDKLFIQLVQTYNQLFEENPINASGVDAKAILSARLSKSRRLENLIAQLPGEKKNGLFGNLIALSLGLTPNFKSNFDLAEDAKLQLSKDTYDDDLDNLLAQIGDQYADLFLAAKNLSDAILLSDILRVNTEITKAPLSASMIKRYDEHHQDLTLLKALVRQQLPEKYKEIFFDQSKNGYAGYIDGGASQEEFYKFIKPILEKMDGTEELLVKLNREDLLRKQRTFDNGSIPHQIHLGELHAILRRQEDFYPFLKDNREKIEKILTFRIPYYVGPLARGNSRFAWMTRKSEETITPWNFEEVVDKGASAQSFIERMTNFDKNLPNEKVLPKHSLLYEYFTVYNELTKVKYVTEGMRKPAFLSGEQKKAIVDLLFKTNRKVTVKQLKEDYFKKIECFDSVEISGVEDRFNASLGTYHDLLKIIKDKDFLDNEENEDILEDIVLTLTLFEDREMIEERLKTYAHLFDDKVMKQLKRRRYTGWGRLSRKLINGIRDKQSGKTILDFLKSDGFANRNFMQLIHDDSLTFKEDIQKAQVSGQGDSLHEHIANLAGSPAIKKGILQTVKVVDELVKVMGRHKPENIVIEMARENQTTQKGQKNSRERMKRIEEGIKELGSQILKEHPVENTQLQNEKLYLYYLQNGRDMYVDQELDINRLSDYDVDHIVPQSFLKDDSIDNKVLTRSDKARGKSDNVPSEEVVKKMKNYWRQLLNAKLITQRKFDNLTKAERGGLSELDKAGFIKRQLVETRQITKHVAQILDSRMNTKYDENDKLIREVKVITLKSKLVSDFRKDFQFYKVREINNYHHAHDAYLNAVVGTALIKKYPKLESEFVYGDYKVYDVRKMIAKSEQEIGKATAKYFFYSNIMNFFKTEITLANGEIRKRPLIETNGETGEIVWDKGRDFATVRKVLSMPQVNIVKKTEVQTGGFSKESILPKRNSDKLIARKKDWDPKKYGGFDSPTVAYSVLVVAKVEKGKSKKLKSVKELLGITIMERSSFEKNPIDFLEAKGYKEVKKDLIIKLPKYSLFELENGRKRMLASAGELQKGNELALPSKYVNFLYLASHYEKLKGSPEDNEQKQLFVEQHKHYLDEIIEQISEFSKRVILADANLDKVLSAYNKHRDKPIREQAENIIHLFTLTNLGAPAAFKYFDTTIDRKRYTSTKEVLDATLIHQSITGLYETRIDLSQLGGDGGPAPGGLDDEYRLYSPLVKPDQNIQFWLEQFPQAWAETAGMGLAKQVPPQVIQLKASATPVSVRQYPLSKEAQEGIRPHVQRLIQQGILVPVQSPWNTPLLPVRKPGTNDYRPVQDLREVNKRVQDIHPTVPNPYNLLCALPPQRSWYTVLDLKDAFFCLRLHPTSQPLFAFEWRDPGTGRTGQLTWTRLPQGFKNSPTIFNEALHRDLANFRIQHPQVTLLQYVDDLLLAGATKQDCLEGTKALLLELSDLGYRASAKKAQICRREVTYLGYSLRDGQRWLTEARKKTVVQIPAPTTAKQVREFLGKAGFCRLFIPGFATLAAPLYPLTKPKGEFSWAPEHQKAFDAIKKALLSAPALALPDVTKPFTLYVDERKGVARGVLTQTLGPWRRPVAYLSKKLDPVASGWPVCLKAIAAVAILVKDADKLTLGQNITVIAPHALENIVRQPPDRWMTNARMTHYQSLLLTERVTFAPPAALNPATLLPEETDEPVTHDCHQLLIEETGVRKDLTDIPLTGEVLTWFTDGSSYVVEGKRMAGAAVVDGTRTIWASSLPEGTSAQKAELMALTQALRLAEGKSINIYTDSRYAFATAHVHGAIYKQRGWLTSAGREIKNKEEILSLLEALHLPKRLAIIHCPGHQKAKDPISRGNQMADRVAKQAAQGVNLLPAGKRTADGSEFEKRTADGSEFESPKKKAKVE

SEQ ID NO: 21565 - protein, 2086 aa, synthetic construct; identical to SEQ ID NO: 69

SEQ ID NO: 21566 - protein, 2083 aa, synthetic construct; identical to SEQ ID NO: 88

SEQ ID NO: 21567 - protein, 2086 aa, synthetic construct; identical to SEQ ID NO: 85

SEQ ID NO: 21568 - protein, 2085 aa, synthetic construct
MPAAKRVKLDGGDKKYSIGLDIGTNSVGWAVITDEYKVPSKKFKVLGNTDRHSIKKNLIGALLFDSGETAEATRLKRTARRRYTRRKNRICYLQEIFSNEMAKVDDSFFHRLEESFLVEEDKKHERHPIFGNIVDEVAYHEKYPTIYHLRKKLVDSTDKADLRLIYLALAHMIKFRGHFLIEGDLNPDNSDVDKLFIQLVQTYNQLFEENPINASGVDAKAILSARLSKSRRLENLIAQLPGEKKNGLFGNLIALSLGLTPNFKSNFDLAEDAKLQLSKDTYDDDLDNLLAQIGDQYADLFLAAKNLSDAILLSDILRVNTEITKAPLSASMIKRYDEHHQDLTLLKALVRQQLPEKYKEIFFDQSKNGYAGYIDGGASQEEFYKFIKPILEKMDGTEELLVKLNREDLLRKQRTFDNGSIPHQIHLGELHAILRRQEDFYPFLKDNREKIEKILTFRIPYYVGPLARGNSRFAWMTRKSEETITPWNFEEVVDKGASAQSFIERMTNFDKNLPNEKVLPKHSLLYEYFTVYNELTKVKYVTEGMRKPAFLSGEQKKAIVDLLFKTNRKVTVKQLKEDYFKKIECFDSVEISGVEDRFNASLGTYHDLLKIIKDKDFLDNEENEDILEDIVLTLTLFEDREMIEERLKTYAHLFDDKVMKQLKRRRYTGWGRLSRKLINGIRDKQSGKTILDFLKSDGFANRNFMQLIHDDSLTFKEDIQKAQVSGQGDSLHEHIANLAGSPAIKKGILQTVKVVDELVKVMGRHKPENIVIEMARENQTTQKGQKNSRERMKRIEEGIKELGSQILKEHPVENTQLQNEKLYLYYLQNGRDMYVDQELDINRLSDYDVDHIVPQSFLKDDSIDNKVLTRSDKARGKSDNVPSEEVVKKMKNYWRQLLNAKLITQRKFDNLTKAERGGLSELDKAGFIKRQLVETRQITKHVAQILDSRMNTKYDENDKLIREVKVITLKSKLVSDFRKDFQFYKVREINNYHHAHDAYLNAVVGTALIKKYPKLESEFVYGDYKVYDVRKMIAKSEQEIGKATAKYFFYSNIMNFFKTEITLANGEIRKRPLIETNGETGEIVWDKGRDFATVRKVLSMPQVNIVKKTEVQTGGFSKESILPKRNSDKLIARKKDWDPKKYGGFDSPTVAYSVLVVAKVEKGKSKKLKSVKELLGITIMERSSFEKNPIDFLEAKGYKEVKKDLIIKLPKYSLFELENGRKRMLASAGELQKGNELALPSKYVNFLYLASHYEKLKGSPEDNEQKQLFVEQHKHYLDEIIEQISEFSKRVILADANLDKVLSAYNKHRDKPIREQAENIIHLFTLTNLGAPAAFKYFDTTIDRKRYTSTKEVLDATLIHQSITGLYETRIDLSQLGGDGGGGGEAAAKGGLDDEYRLYSPLVKPDQNIQFWLEQFPQAWAETAGMGLAKQVPPQVIQLKASATPVSVRQYPLSKEAQEGIRPHVQRLIQQGILVPVQSPWNTPLLPVRKPGTNDYRPVQDLREVNKRVQDIHPTVPNPYNLLCALPPQRSWYTVLDLKDAFFCLRLHPTSQPLFAFEWRDPGTGRTGQLTWTRLPQGFKNSPTIFNEALHRDLANFRIQHPQVTLLQYVDDLLLAGATKQDCLEGTKALLLELSDLGYRASAKKAQICRREVTYLGYSLRDGQRWLTEARKKTVVQIPAPTTAKQVREFLGKAGFCRLFIPGFATLAAPLYPLTKPKGEFSWAPEHQKAFDAIKKALLSAPALALPDVTKPFTLYVDERKGVARGVLTQTLGPWRRPVAYLSKKLDPVASGWPVCLKAIAAVAILVKDADKLTLGQNITVIAPHALENIVRQPPDRWMTNARMTHYQSLLLTERVTFAPPAALNPATLLPEETDEPVTHDCHQLLIEETGVRKDLTDIPLTGEVLTWFTDGSSYVVEGKRMAGAAVVDGTRTIWASSLPEGTSAQKAELMALTQALRLAEGKSINIYTDSRYAFATAHVHGAIYKQRGWLTSAGREIKNKEEILSLLEALHLPKRLAIIHCPGHQKAKDPISRGNQMADRVAKQAAQGVNLLPAGKRTADGSEFEKRTADGSEFESPKKKAKVE

SEQ ID NO: 21569 - protein, 2086 aa, synthetic construct
MPAAKRVKLDGGDKKYSIGLDIGTNSVGWAVITDEYKVPSKKFKVLGNTDRHSIKKNLIGALLFDSGETAEATRLKRTARRRYTRRKNRICYLQEIFSNEMAKVDDSFFHRLEESFLVEEDKKHERHPIFGNIVDEVAYHEKYPTIYHLRKKLVDSTDKADLRLIYLALAHMIKFRGHFLIEGDLNPDNSDVDKLFIQLVQTYNQLFEENPINASGVDAKAILSARLSKSRRLENLIAQLPGEKKNGLFGNLIALSLGLTPNFKSNFDLAEDAKLQLSKDTYDDDLDNLLAQIGDQYADLFLAAKNLSDAILLSDILRVNTEITKAPLSASMIKRYDEHHQDLTLLKALVRQQLPEKYKEIFFDQSKNGYAGYIDGGASQEEFYKFIKPILEKMDGTEELLVKLNREDLLRKQRTFDNGSIPHQIHLGELHAILRRQEDFYPFLKDNREKIEKILTFRIPYYVGPLARGNSRFAWMTRKSEETITPWNFEEVVDKGASAQSFIERMTNFDKNLPNEKVLPKHSLLYEYFTVYNELTKVKYVTEGMRKPAFLSGEQKKAIVDLLFKTNRKVTVKQLKEDYFKKIECFDSVEISGVEDRFNASLGTYHDLLKIIKDKDFLDNEENEDILEDIVLTLTLFEDREMIEERLKTYAHLFDDKVMKQLKRRRYTGWGRLSRKLINGIRDKQSGKTILDFLKSDGFANRNFMQLIHDDSLTFKEDIQKAQVSGQGDSLHEHIANLAGSPAIKKGILQTVKVVDELVKVMGRHKPENIVIEMARENQTTQKGQKNSRERMKRIEEGIKELGSQILKEHPVENTQLQNEKLYLYYLQNGRDMYVDQELDINRLSDYDVDHIVPQSFLKDDSIDNKVLTRSDKARGKSDNVPSEEVVKKMKNYWRQLLNAKLITQRKFDNLTKAERGGLSELDKAGFIKRQLVETRQITKHVAQILDSRMNTKYDENDKLIREVKVITLKSKLVSDFRKDFQFYKVREINNYHHAHDAYLNAVVGTALIKKYPKLESEFVYGDYKVYDVRKMIAKSEQEIGKATAKYFFYSNIMNFFKTEITLANGEIRKRPLIETNGETGEIVWDKGRDFATVRKVLSMPQVNIVKKTEVQTGGFSKESILPKRNSDKLIARKKDWDPKKYGGFDSPTVAYSVLVVAKVEKGKSKKLKSVKELLGITIMERSSFEKNPIDFLEAKGYKEVKKDLIIKLPKYSLFELENGRKRMLASAGELQKGNELALPSKYVNFLYLASHYEKLKGSPEDNEQKQLFVEQHKHYLDEIIEQISEFSKRVILADANLDKVLSAYNKHRDKPIREQAENIIHLFTLTNLGAPAAFKYFDTTIDRKRYTSTKEVLDATLIHQSITGLYETRIDLSQLGGDGGGGSGGGGSSGGLDDEYRLYSPLVKPDQNIQFWLEQFPQAWAETAGMGLAKQVPPQVIQLKASATPVSVRQYPLSKEAQEGIRPHVQRLIQQGILVPVQSPWNTPLLPVRKPGTNDYRPVQDLREVNKRVQDIHPTVPNPYNLLCALPPQRSWYTVLDLKDAFFCLRLHPTSQPLFAFEWRDPGTGRTGQLTWTRLPQGFKNSPTIFNEALHRDLANFRIQHPQVTLLQYVDDLLLAGATKQDCLEGTKALLLELSDLGYRASAKKAQICRREVTYLGYSLRDGQRWLTEARKKTVVQIPAPTTAKQVREFLGKAGFCRLFIPGFATLAAPLYPLTKPKGEFSWAPEHQKAFDAIKKALLSAPALALPDVTKPFTLYVDERKGVARGVLTQTLGPWRRPVAYLSKKLDPVASGWPVCLKAIAAVAILVKDADKLTLGQNITVIAPHALENIVRQPPDRWMTNARMTHYQSLLLTERVTFAPPAALNPATLLPEETDEPVTHDCHQLLIEETGVRKDLTDIPLTGEVLTWFTDGSSYVVEGKRMAGAAVVDGTRTIWASSLPEGTSAQKAELMALTQALRLAEGKSINIYTDSRYAFATAHVHGAIYKQRGWLTSAGREIKNKEEILSLLEALHLPKRLAIIHCPGHQKAKDPISRGNQMADRVAKQAAQGVNLLPAGKRTADGSEFEKRTADGSEFESPKKKAKVE

SEQ ID NO: 21570 - protein, 2086 aa, synthetic construct; identical to SEQ ID NO: 91

SEQ ID NO: 21571 - protein, 2086 aa, synthetic construct; identical to SEQ ID NO: 95

SEQ ID NO: 21572 - protein, 2085 aa, synthetic construct
MPAAKRVKLDGGDKKYSIGLDIGTNSVGWAVITDEYKVPSKKFKVLGNTDRHSIKKNLIGALLFDSGETAEATRLKRTARRRYTRRKNRICYLQEIFSNEMAKVDDSFFHRLEESFLVEEDKKHERHPIFGNIVDEVAYHEKYPTIYHLRKKLVDSTDKADLRLIYLALAHMIKFRGHFLIEGDLNPDNSDVDKLFIQLVQTYNQLFEENPINASGVDAKAILSARLSKSRRLENLIAQLPGEKKNGLFGNLIALSLGLTPNFKSNFDLAEDAKLQLSKDTYDDDLDNLLAQIGDQYADLFLAAKNLSDAILLSDILRVNTEITKAPLSASMIKRYDEHHQDLTLLKALVRQQLPEKYKEIFFDQSKNGYAGYIDGGASQEEFYKFIKPILEKMDGTEELLVKLNREDLLRKQRTFDNGSIPHQIHLGELHAILRRQEDFYPFLKDNREKIEKILTFRIPYYVGPLARGNSRFAWMTRKSEETITPWNFEEVVDKGASAQSFIERMTNFDKNLPNEKVLPKHSLLYEYFTVYNELTKVKYVTEGMRKPAFLSGEQKKAIVDLLFKTNRKVTVKQLKEDYFKKIECFDSVEISGVEDRFNASLGTYHDLLKIIKDKDFLDNEENEDILEDIVLTLTLFEDREMIEERLKTYAHLFDDKVMKQLKRRRYTGWGRLSRKLINGIRDKQSGKTILDFLKSDGFANRNFMQLIHDDSLTFKEDIQKAQVSGQGDSLHEHIANLAGSPAIKKGILQTVKVVDELVKVMGRHKPENIVIEMARENQTTQKGQKNSRERMKRIEEGIKELGSQILKEHPVENTQLQNEKLYLYYLQNGRDMYVDQELDINRLSDYDVDHIVPQSFLKDDSIDNKVLTRSDKARGKSDNVPSEEVVKKMKNYWRQLLNAKLITQRKFDNLTKAERGGLSELDKAGFIKRQLVETRQITKHVAQILDSRMNTKYDENDKLIREVKVITLKSKLVSDFRKDFQFYKVREINNYHHAHDAYLNAVVGTALIKKYPKLESEFVYGDYKVYDVRKMIAKSEQEIGKATAKYFFYSNIMNFFKTEITLANGEIRKRPLIETNGETGEIVWDKGRDFATVRKVLSMPQVNIVKKTEVQTGGFSKESILPKRNSDKLIARKKDWDPKKYGGFDSPTVAYSVLVVAKVEKGKSKKLKSVKELLGITIMERSSFEKNPIDFLEAKGYKEVKKDLIIKLPKYSLFELENGRKRMLASAGELQKGNELALPSKYVNFLYLASHYEKLKGSPEDNEQKQLFVEQHKHYLDEIIEQISEFSKRVILADANLDKVLSAYNKHRDKPIREQAENIIHLFTLTNLGAPAAFKYFDTTIDRKRYTSTKEVLDATLIHQSITGLYETRIDLSQLGGDGGGGSEAAAKGGLDDEYRLYSPLVKPDQNIQFWLEQFPQAWAETAGMGLAKQVPPQVIQLKASATPVSVRQYPLSKEAQEGIRPHVQRLIQQGILVPVQSPWNTPLLPVRKPGTNDYRPVQDLREVNKRVQDIHPTVPNPYNLLCALPPQRSWYTVLDLKDAFFCLRLHPTSQPLFAFEWRDPGTGRTGQLTWTRLPQGFKNSPTIFNEALHRDLANFRIQHPQVTLLQYVDDLLLAGATKQDCLEGTKALLLELSDLGYRASAKKAQICRREVTYLGYSLRDGQRWLTEARKKTVVQIPAPTTAKQVREFLGKAGFCRLFIPGFATLAAPLYPLTKPKGEFSWAPEHQKAFDAIKKALLSAPALALPDVTKPFTLYVDERKGVARGVLTQTLGPWRRPVAYLSKKLDPVASGWPVCLKAIAAVAILVKDADKLTLGQNITVIAPHALENIVRQPPDRWMTNARMTHYQSLLLTERVTFAPPAALNPATLLPEETDEPVTHDCHQLLIEETGVRKDLTDIPLTGEVLTWFTDGSSYVVEGKRMAGAAVVDGTRTIWASSLPEGTSAQKAELMALTQALRLAEGKSINIYTDSRYAFATAHVHGAIYKQRGWLTSAGREIKNKEEILSLLEALHLPKRLAIIHCPGHQKAKDPISRGNQMADRVAKQAAQGVNLLPAGKRTADGSEFEKRTADGSEFESPKKKAKVE

SEQ ID NO: 21573 - protein, 2090 aa, synthetic construct; identical to SEQ ID NO: 21410

SEQ ID NO: 21574 - protein, 2094 aa, synthetic construct
MPAAKRVKLDGGDKKYSIGLDIGTNSVGWAVITDEYKVPSKKFKVLGNTDRHSIKKNLIGALLFDSGETAEATRLKRTARRRYTRRKNRICYLQEIFSNEMAKVDDSFFHRLEESFLVEEDKKHERHPIFGNIVDEVAYHEKYPTIYHLRKKLVDSTDKADLRLIYLALAHMIKFRGHFLIEGDLNPDNSDVDKLFIQLVQTYNQLFEENPINASGVDAKAILSARLSKSRRLENLIAQLPGEKKNGLFGNLIALSLGLTPNFKSNFDLAEDAKLQLSKDTYDDDLDNLLAQIGDQYADLFLAAKNLSDAILLSDILRVNTEITKAPLSASMIKRYDEHHQDLTLLKALVRQQLPEKYKEIFFDQSKNGYAGYIDGGASQEEFYKFIKPILEKMDGTEELLVKLNREDLLRKQRTFDNGSIPHQIHLGELHAILRRQEDFYPFLKDNREKIEKILTFRIPYYVGPLARGNSRFAWMTRKSEETITPWNFEEVVDKGASAQSFIERMTNFDKNLPNEKVLPKHSLLYEYFTVYNELTKVKYVTEGMRKPAFLSGEQKKAIVDLLFKTNRKVTVKQLKEDYFKKIECFDSVEISGVEDRFNASLGTYHDLLKIIKDKDFLDNEENEDILEDIVLTLTLFEDREMIEERLKTYAHLFDDKVMKQLKRRRYTGWGRLSRKLINGIRDKQSGKTILDFLKSDGFANRNFMQLIHDDSLTFKEDIQKAQVSGQGDSLHEHIANLAGSPAIKKGILQTVKVVDELVKVMGRHKPENIVIEMARENQTTQKGQKNSRERMKRIEEGIKELGSQILKEHPVENTQLQNEKLYLYYLQNGRDMYVDQELDINRLSDYDVDHIVPQSFLKDDSIDNKVLTRSDKARGKSDNVPSEEVVKKMKNYWRQLLNAKLITQRKFDNLTKAERGGLSELDKAGFIKRQLVETRQITKHVAQILDSRMNTKYDENDKLIREVKVITLKSKLVSDFRKDFQFYKVREINNYHHAHDAYLNAVVGTALIKKYPKLESEFVYGDYKVYDVRKMIAKSEQEIGKATAKYFFYSNIMNFFKTEITLANGEIRKRPLIETNGETGEIVWDKGRDFATVRKVLSMPQVNIVKKTEVQTGGFSKESILPKRNSDKLIARKKDWDPKKYGGFDSPTVAYSVLVVAKVEKGKSKKLKSVKELLGITIMERSSFEKNPIDFLEAKGYKEVKKDLIIKLPKYSLFELENGRKRMLASAGELQKGNELALPSKYVNFLYLASHYEKLKGSPEDNEQKQLFVEQHKHYLDEIIEQISEFSKRVILADANLDKVLSAYNKHRDKPIREQAENIIHLFTLTNLGAPAAFKYFDTTIDRKRYTSTKEVLDATLIHQSITGLYETRIDLSQLGGDGGEAAAKEAAAKEAAAKGGTLQLDDEYRLYSPLVKPDQNIQFWLEQFPQAWAETAGMGLAKQVPPQVIQLKASATPVSVRQYPLSKEAQEGIRPHVQRLIQQGILVPVQSPWNTPLLPVRKPGTNDYRPVQDLREVNKRVQDIHPTVPNPYNLLCALPPQRSWYTVLDLKDAFFCLRLHPTSQPLFAFEWRDPGTGRTGQLTWTRLPQGFKNSPTIFDEALHRDLANFRIQHPQVTLLQYVDDLLLAGATKQDCLEGTKALLLELSDLGYRASAKKAQICRREVTYLGYSLRDGQRWLTEARKKTVVQIPAPTTAKQVREFLGTAGFCRLWIPGFATLAAPLYPLTKEKGEFSWAPEHQKAFDAIKKALLSAPALALPDVTKPFTLYVDERKGVARGVLTQTLGPWRRPVAYLSKKLDPVASGWPVCLKAIAAVAILVKDADKLTLGQNITVIAPHALENIVRQPPDRWMTNARMTHYQSLLLTERVTFAPPAALNPATLLPEETDEPVTHDCHQLLIEETGVRKDLTDIPLTGEVLTWFTDGSSYVVEGKRMAGAAVVDGTRTIWASSLPEGTSAQKAELMALTQALRLAEGKSINIYTDSRYAFATAHVHGAIYKQRGLLTSAGREIKNKEEILSLLEALHLPKRLAIIHCPGHQKAKDPISRGNQMADRVAKQAAQGVNLLAGKRTADGSEFEKRTADGSEFESPKKKAKVE

SEQ ID NO: 21575 - protein, 2109 aa, synthetic construct
MPAAKRVKLDGGDKKYSIGLDIGTNSVGWAVITDEYKVPSKKFKVLGNTDRHSIKKNLIGALLFDSGETAEATRLKRTARRRYTRRKNRICYLQEIFSNEMAKVDDSFFHRLEESFLVEEDKKHERHPIFGNIVDEVAYHEKYPTIYHLRKKLVDSTDKADLRLIYLALAHMIKFRGHFLIEGDLNPDNSDVDKLFIQLVQTYNQLFEENPINASGVDAKAILSARLSKSRRLENLIAQLPGEKKNGLFGNLIALSLGLTPNFKSNFDLAEDAKLQLSKDTYDDDLDNLLAQIGDQYADLFLAAKNLSDAILLSDILRVNTEITKAPLSASMIKRYDEHHQDLTLLKALVRQQLPEKYKEIFFDQSKNGYAGYIDGGASQEEFYKFIKPILEKMDGTEELLVKLNREDLLRKQRTFDNGSIPHQIHLGELHAILRRQEDFYPFLKDNREKIEKILTFRIPYYVGPLARGNSRFAWMTRKSEETITPWNFEEVVDKGASAQSFIERMTNFDKNLPNEKVLPKHSLLYEYFTVYNELTKVKYVTEGMRKPAFLSGEQKKAIVDLLFKTNRKVTVKQLKEDYFKKIECFDSVEISGVEDRFNASLGTYHDLLKIIKDKDFLDNEENEDILEDIVLTLTLFEDREMIEERLKTYAHLFDDKVMKQLKRRRYTGWGRLSRKLINGIRDKQSGKTILDFLKSDGFANRNFMQLIHDDSLTFKEDIQKAQVSGQGDSLHEHIANLAGSPAIKKGILQTVKVVDELVKVMGRHKPENIVIEMARENQTTQKGQKNSRERMKRIEEGIKELGSQILKEHPVENTQLQNEKLYLYYLQNGRDMYVDQELDINRLSDYDVDHIVPQSFLKDDSIDNKVLTRSDKARGKSDNVPSEEVVKKMKNYWRQLLNAKLITQRKFDNLTKAERGGLSELDKAGFIKRQLVETRQITKHVAQILDSRMNTKYDENDKLIREVKVITLKSKLVSDFRKDFQFYKVREINNYHHAHDAYLNAVVGTALIKKYPKLESEFVYGDYKVYDVRKMIAKSEQEIGKATAKYFFYSNIMNFFKTEITLANGEIRKRPLIETNGETGEIVWDKGRDFATVRKVLSMPQVNIVKKTEVQTGGFSKESILPKRNSDKLIARKKDWDPKKYGGFDSPTVAYSVLVVAKVEKGKSKKLKSVKELLGITIMERSSFEKNPIDFLEAKGYKEVKKDLIIKLPKYSLFELENGRKRMLASAGELQKGNELALPSKYVNFLYLASHYEKLKGSPEDNEQKQLFVEQHKHYLDEIIEQISEFSKRVILADANLDKVLSAYNKHRDKPIREQAENIIHLFTLTNLGAPAAFKYFDTTIDRKRYTSTKEVLDATLIHQSITGLYETRIDLSQLGGDGGEAAAKEAAAKEAAAKEAAAKEAAAKEAAAKGGTLQLDDEYRLYSPLVKPDQNIQFWLEQFPQAWAETAGMGLAKQVPPQVIQLKASATPVSVRQYPLSKEAQEGIRPHVQRLIQQGILVPVQSPWNTPLLPVRKPGTNDYRPVQDLREVNKRVQDIHPTVPNPYNLLCALPPQRSWYTVLDLKDAFFCLRLHPTSQPLFAFEWRDPGTGRTGQLTWTRLPQGFKNSPTIFDEALHRDLANFRIQHPQVTLLQYVDDLLLAGATKQDCLEGTKALLLELSDLGYRASAKKAQICRREVTYLGYSLRDGQRWLTEARKKTVVQIPAPTTAKQVREFLGTAGFCRLWIPGFATLAAPLYPLTKEKGEFSWAPEHQKAFDAIKKALLSAPALALPDVTKPFTLYVDERKGVARGVLTQTLGPWRRPVAYLSKKLDPVASGWPVCLKAIAAVAILVKDADKLTLGQNITVIAPHALENIVRQPPDRWMTNARMTHYQSLLLTERVTFAPPAALNPATLLPEETDEPVTHDCHQLLIEETGVRKDLTDIPLTGEVLTWFTDGSSYVVEGKRMAGAAVVDGTRTIWASSLPEGTSAQKAELMALTQALRLAEGKSINIYTDSRYAFATAHVHGAIYKQRGLLTSAGREIKNKEEILSLLEALHLPKRLAIIHCPGHQKAKDPISRGNQMADRVAKQAAQGVNLLAGKRTADGSEFEKRTADGSEFESPKKKAKVE

SEQ ID NO: 21576 - protein, 2088 aa, synthetic construct
MPAAKRVKLDGGDKKYSIGLDIGTNSVGWAVITDEYKVPSKKFKVLGNTDRHSIKKNLIGALLFDSGETAEATRLKRTARRRYTRRKNRICYLQEIFSNEMAKVDDSFFHRLEESFLVEEDKKHERHPIFGNIVDEVAYHEKYPTIYHLRKKLVDSTDKADLRLIYLALAHMIKFRGHFLIEGDLNPDNSDVDKLFIQLVQTYNQLFEENPINASGVDAKAILSARLSKSRRLENLIAQLPGEKKNGLFGNLIALSLGLTPNFKSNFDLAEDAKLQLSKDTYDDDLDNLLAQIGDQYADLFLAAKNLSDAILLSDILRVNTEITKAPLSASMIKRYDEHHQDLTLLKALVRQQLPEKYKEIFFDQSKNGYAGYIDGGASQEEFYKFIKPILEKMDGTEELLVKLNREDLLRKQRTFDNGSIPHQIHLGELHAILRRQEDFYPFLKDNREKIEKILTFRIPYYVGPLARGNSRFAWMTRKSEETITPWNFEEVVDKGASAQSFIERMTNFDKNLPNEKVLPKHSLLYEYFTVYNELTKVKYVTEGMRKPAFLSGEQKKAIVDLLFKTNRKVTVKQLKEDYFKKIECFDSVEISGVEDRFNASLGTYHDLLKIIKDKDFLDNEENEDILEDIVLTLTLFEDREMIEERLKTYAHLFDDKVMKQLKRRRYTGWGRLSRKLINGIRDKQSGKTILDFLKSDGFANRNFMQLIHDDSLTFKEDIQKAQVSGQGDSLHEHIANLAGSPAIKKGILQTVKVVDELVKVMGRHKPENIVIEMARENQTTQKGQKNSRERMKRIEEGIKELGSQILKEHPVENTQLQNEKLYLYYLQNGRDMYVDQELDINRLSDYDVDHIVPQSFLKDDSIDNKVLTRSDKARGKSDNVPSEEVVKKMKNYWRQLLNAKLITQRKFDNLTKAERGGLSELDKAGFIKRQLVETRQITKHVAQILDSRMNTKYDENDKLIREVKVITLKSKLVSDFRKDFQFYKVREINNYHHAHDAYLNAVVGTALIKKYPKLESEFVYGDYKVYDVRKMIAKSEQEIGKATAKYFFYSNIMNFFKTEITLANGEIRKRPLIETNGETGEIVWDKGRDFATVRKVLSMPQVNIVKKTEVQTGGFSKESILPKRNSDKLIARKKDWDPKKYGGFDSPTVAYSVLVVAKVEKGKSKKLKSVKELLGITIMERSSFEKNPIDFLEAKGYKEVKKDLIIKLPKYSLFELENGRKRMLASAGELQKGNELALPSKYVNFLYLASHYEKLKGSPEDNEQKQLFVEQHKHYLDEIIEQISEFSKRVILADANLDKVLSAYNKHRDKPIREQAENIIHLFTLTNLGAPAAFKYFDTTIDRKRYTSTKEVLDATLIHQSITGLYETRIDLSQLGGDGGPAPGGSGSSGGTLQLDDEYRLYSPLVKPDQNIQFWLEQFPQAWAETAGMGLAKQVPPQVIQLKASATPVSVRQYPLSKEAQEGIRPHVQRLIQQGILVPVQSPWNTPLLPVRKPGTNDYRPVQDLREVNKRVQDIHPTVPNPYNLLCALPPQRSWYTVLDLKDAFFCLRLHPTSQPLFAFEWRDPGTGRTGQLTWTRLPQGFKNSPTIFDEALHRDLANFRIQHPQVTLLQYVDDLLLAGATKQDCLEGTKALLLELSDLGYRASAKKAQICRREVTYLGYSLRDGQRWLTEARKKTVVQIPAPTTAKQVREFLGTAGFCRLWIPGFATLAAPLYPLTKEKGEFSWAPEHQKAFDAIKKALLSAPALALPDVTKPFTLYVDERKGVARGVLTQTLGPWRRPVAYLSKKLDPVASGWPVCLKAIAAVAILVKDADKLTLGQNITVIAPHALENIVRQPPDRWMTNARMTHYQSLLLTERVTFAPPAALNPATLLPEETDEPVTHDCHQLLIEETGVRKDLTDIPLTGEVLTWFTDGSSYVVEGKRMAGAAVVDGTRTIWASSLPEGTSAQKAELMALTQALRLAEGKSINIYTDSRYAFATAHVHGAIYKQRGLLTSAGREIKNKEEILSLLEALHLPKRLAIIHCPGHQKAKDPISRGNQMADRVAKQAAQGVNLLAGKRTADGSEFEKRTADGSEFESPKKKAKVE

SEQ ID NO: 21577 - protein, 2087 aa, synthetic construct
MPAAKRVKLDGGDKKYSIGLDIGTNSVGWAVITDEYKVPSKKFKVLGNTDRHSIKKNLIGALLFDSGETAEATRLKRTARRRYTRRKNRICYLQEIFSNEMAKVDDSFFHRLEESFLVEEDKKHERHPIFGNIVDEVAYHEKYPTIYHLRKKLVDSTDKADLRLIYLALAHMIKFRGHFLIEGDLNPDNSDVDKLFIQLVQTYNQLFEENPINASGVDAKAILSARLSKSRRLENLIAQLPGEKKNGLFGNLIALSLGLTPNFKSNFDLAEDAKLQLSKDTYDDDLDNLLAQIGDQYADLFLAAKNLSDAILLSDILRVNTEITKAPLSASMIKRYDEHHQDLTLLKALVRQQLPEKYKEIFFDQSKNGYAGYIDGGASQEEFYKFIKPILEKMDGTEELLVKLNREDLLRKQRTFDNGSIPHQIHLGELHAILRRQEDFYPFLKDNREKIEKILTFRIPYYVGPLARGNSRFAWMTRKSEETITPWNFEEVVDKGASAQSFIERMTNFDKNLPNEKVLPKHSLLYEYFTVYNELTKVKYVTEGMRKPAFLSGEQKKAIVDLLFKTNRKVTVKQLKEDYFKKIECFDSVEISGVEDRFNASLGTYHDLLKIIKDKDFLDNEENEDILEDIVLTLTLFEDREMIEERLKTYAHLFDDKVMKQLKRRRYTGWGRLSRKLINGIRDKQSGKTILDFLKSDGFANRNFMQLIHDDSLTFKEDIQKAQVSGQGDSLHEHIANLAGSPAIKKGILQTVKVVDELVKVMGRHKPENIVIEMARENQTTQKGQKNSRERMKRIEEGIKELGSQILKEHPVENTQLQNEKLYLYYLQNGRDMYVDQELDINRLSDYDVDHIVPQSFLKDDSIDNKVLTRSDKARGKSDNVPSEEVVKKMKNYWRQLLNAKLITQRKFDNLTKAERGGLSELDKAGFIKRQLVETRQITKHVAQILDSRMNTKYDENDKLIREVKVITLKSKLVSDFRKDFQFYKVREINNYHHAHDAYLNAVVGTALIKKYPKLESEFVYGDYKVYDVRKMIAKSEQEIGKATAKYFFYSNIMNFFKTEITLANGEIRKRPLIETNGETGEIVWDKGRDFATVRKVLSMPQVNIVKKTEVQTGGFSKESILPKRNSDKLIARKKDWDPKKYGGFDSPTVAYSVLVVAKVEKGKSKKLKSVKELLGITIMERSSFEKNPIDFLEAKGYKEVKKDLIIKLPKYSLFELENGRKRMLASAGELQKGNELALPSKYVNFLYLASHYEKLKGSPEDNEQKQLFVEQHKHYLDEIIEQISEFSKRVILADANLDKVLSAYNKHRDKPIREQAENIIHLFTLTNLGAPAAFKYFDTTIDRKRYTSTKEVLDATLIHQSITGLYETRIDLSQLGGDGGEAAAKGGGGGTLQLDDEYRLYSPLVKPDQNIQFWLEQFPQAWAETAGMGLAKQVPPQVIQLKASATPVSVRQYPLSKEAQEGIRPHVQRLIQQGILVPVQSPWNTPLLPVRKPGTNDYRPVQDLREVNKRVQDIHPTVPNPYNLLCALPPQRSWYTVLDLKDAFFCLRLHPTSQPLFAFEWRDPGTGRTGQLTWTRLPQGFKNSPTIFDEALHRDLANFRIQHPQVTLLQYVDDLLLAGATKQDCLEGTKALLLELSDLGYRASAKKAQICRREVTYLGYSLRDGQRWLTEARKKTVVQIPAPTTAKQVREFLGTAGFCRLWIPGFATLAAPLYPLTKEKGEFSWAPEHQKAFDAIKKALLSAPALALPDVTKPFTLYVDERKGVARGVLTQTLGPWRRPVAYLSKKLDPVASGWPVCLKAIAAVAILVKDADKLTLGQNITVIAPHALENIVRQPPDRWMTNARMTHYQSLLLTERVTFAPPAALNPATLLPEETDEPVTHDCHQLLIEETGVRKDLTDIPLTGEVLTWFTDGSSYVVEGKRMAGAAVVDGTRTIWASSLPEGTSAQKAELMALTQALRLAEGKSINIYTDSRYAFATAHVHGAIYKQRGLLTSAGREIKNKEEILSLLEALHLPKRLAIIHCPGHQKAKDPISRGNQMADRVAKQAAQGVNLLAGKRTADGSEFEKRTADGSEFESPKKKAKVE

SEQ ID NO: 21578 - protein, 2091 aa, synthetic construct
MPAAKRVKLDGGDKKYSIGLDIGTNSVGWAVITDEYKVPSKKFKVLGNTDRHSIKKNLIGALLFDSGETAEATRLKRTARRRYTRRKNRICYLQEIFSNEMAKVDDSFFHRLEESFLVEEDKKHERHPIFGNIVDEVAYHEKYPTIYHLRKKLVDSTDKADLRLIYLALAHMIKFRGHFLIEGDLNPDNSDVDKLFIQLVQTYNQLFEENPINASGVDAKAILSARLSKSRRLENLIAQLPGEKKNGLFGNLIALSLGLTPNFKSNFDLAEDAKLQLSKDTYDDDLDNLLAQIGDQYADLFLAAKNLSDAILLSDILRVNTEITKAPLSASMIKRYDEHHQDLTLLKALVRQQLPEKYKEIFFDQSKNGYAGYIDGGASQEEFYKFIKPILEKMDGTEELLVKLNREDLLRKQRTFDNGSIPHQIHLGELHAILRRQEDFYPFLKDNREKIEKILTFRIPYYVGPLARGNSRFAWMTRKSEETITPWNFEEVVDKGASAQSFIERMTNFDKNLPNEKVLPKHSLLYEYFTVYNELTKVKYVTEGMRKPAFLSGEQKKAIVDLLFKTNRKVTVKQLKEDYFKKIECFDSVEISGVEDRFNASLGTYHDLLKIIKDKDFLDNEENEDILEDIVLTLTLFEDREMIEERLKTYAHLFDDKVMKQLKRRRYTGWGRLSRKLINGIRDKQSGKTILDFLKSDGFANRNFMQLIHDDSLTFKEDIQKAQVSGQGDSLHEHIANLAGSPAIKKGILQTVKVVDELVKVMGRHKPENIVIEMARENQTTQKGQKNSRERMKRIEEGIKELGSQILKEHPVENTQLQNEKLYLYYLQNGRDMYVDQELDINRLSDYDVDHIVPQSFLKDDSIDNKVLTRSDKARGKSDNVPSEEVVKKMKNYWRQLLNAKLITQRKFDNLTKAERGGLSELDKAGFIKRQLVETRQITKHVAQILDSRMNTKYDENDKLIREVKVITLKSKLVSDFRKDFQFYKVREINNYHHAHDAYLNAVVGTALIKKYPKLESEFVYGDYKVYDVRKMIAKSEQEIGKATAKYFFYSNIMNFFKTEITLANGEIRKRPLIETNGETGEIVWDKGRDFATVRKVLSMPQVNIVKKTEVQTGGFSKESILPKRNSDKLIARKKDWDPKKYGGFDSPTVAYSVLVVAKVEKGKSKKLKSVKELLGITIMERSSFEKNPIDFLEAKGYKEVKKDLIIKLPKYSLFELENGRKRMLASAGELQKGNELALPSKYVNFLYLASHYEKLKGSPEDNEQKQLFVEQHKHYLDEIIEQISEFSKRVILADANLDKVLSAYNKHRDKPIREQAENIIHLFTLTNLGAPAAFKYFDTTIDRKRYTSTKEVLDATLIHQSITGLYETRIDLSQLGGDGGGSAGSAAGSGEFGGTLQLDDEYRLYSPLVKPDQNIQFWLEQFPQAWAETAGMGLAKQVPPQVIQLKASATPVSVRQYPLSKEAQEGIRPHVQRLIQQGILVPVQSPWNTPLLPVRKPGTNDYRPVQDLREVNKRVQDIHPTVPNPYNLLCALPPQRSWYTVLDLKDAFFCLRLHPTSQPLFAFEWRDPGTGRTGQLTWTRLPQGFKNSPTIFDEALHRDLANFRIQHPQVTLLQYVDDLLLAGATKQDCLEGTKALLLELSDLGYRASAKKAQICRREVTYLGYSLRDGQRWLTEARKKTVVQIPAPTTAKQVREFLGTAGFCRLWIPGFATLAAPLYPLTKEKGEFSWAPEHQKAFDAIKKALLSAPALALPDVTKPFTLYVDERKGVARGVLTQTLGPWRRPVAYLSKKLDPVASGWPVCLKAIAAVAILVKDADKLTLGQNITVIAPHALENIVRQPPDRWMTNARMTHYQSLLLTERVTFAPPAALNPATLLPEETDEPVTHDCHQLLIEETGVRKDLTDIPLTGEVLTWFTDGSSYVVEGKRMAGAAVVDGTRTIWASSLPEGTSAQKAELMALTQALRLAEGKSINIYTDSRYAFATAHVHGAIYKQRGLLTSAGREIKNKEEILSLLEALHLPKRLAIIHCPGHQKAKDPISRGNQMADRVAKQAAQGVNLLAGKRTADGSEFEKRTADGSEFESPKKKAKVE

SEQ ID NO: 21579 - protein, 2088 aa, synthetic construct
MPAAKRVKLDGGDKKYSIGLDIGTNSVGWAVITDEYKVPSKKFKVLGNTDRHSIKKNLIGALLFDSGETAEATRLKRTARRRYTRRKNRICYLQEIFSNEMAKVDDSFFHRLEESFLVEEDKKHERHPIFGNIVDEVAYHEKYPTIYHLRKKLVDSTDKADLRLIYLALAHMIKFRGHFLIEGDLNPDNSDVDKLFIQLVQTYNQLFEENPINASGVDAKAILSARLSKSRRLENLIAQLPGEKKNGLFGNLIALSLGLTPNFKSNFDLAEDAKLQLSKDTYDDDLDNLLAQIGDQYADLFLAAKNLSDAILLSDILRVNTEITKAPLSASMIKRYDEHHQDLTLLKALVRQQLPEKYKEIFFDQSKNGYAGYIDGGASQEEFYKFIKPILEKMDGTEELLVKLNREDLLRKQRTFDNGSIPHQIHLGELHAILRRQEDFYPFLKDNREKIEKILTFRIPYYVGPLARGNSRFAWMTRKSEETITPWNFEEVVDKGASAQSFIERMTNFDKNLPNEKVLPKHSLLYEYFTVYNELTKVKYVTEGMRKPAFLSGEQKKAIVDLLFKTNRKVTVKQLKEDYFKKIECFDSVEISGVEDRFNASLGTYHDLLKIIKDKDFLDNEENEDILEDIVLTLTLFEDREMIEERLKTYAHLFDDKVMKQLKRRRYTGWGRLSRKLINGIRDKQSGKTILDFLKSDGFANRNFMQLIHDDSLTFKEDIQKAQVSGQGDSLHEHIANLAGSPAIKKGILQTVKVVDELVKVMGRHKPENIVIEMARENQTTQKGQKNSRERMKRIEEGIKELGSQILKEHPVENTQLQNEKLYLYYLQNGRDMYVDQELDINRLSDYDVDHIVPQSFLKDDSIDNKVLTRSDKARGKSDNVPSEEVVKKMKNYWRQLLNAKLITQRKFDNLTKAERGGLSELDKAGFIKRQLVETRQITKHVAQILDSRMNTKYDENDKLIREVKVITLKSKLVSDFRKDFQFYKVREINNYHHAHDAYLNAVVGTALIKKYPKLESEFVYGDYKVYDVRKMIAKSEQEIGKATAKYFFYSNIMNFFKTEITLANGEIRKRPLIETNGETGEIVWDKGRDFATVRKVLSMPQVNIVKKTEVQTGGFSKESILPKRNSDKLIARKKDWDPKKYGGFDSPTVAYSVLVVAKVEKGKSKKLKSVKELLGITIMERSSFEKNPIDFLEAKGYKEVKKDLIIKLPKYSLFELENGRKRMLASAGELQKGNELALPSKYVNFLYLASHYEKLKGSPEDNEQKQLFVEQHKHYLDEIIEQISEFSKRVILADANLDKVLSAYNKHRDKPIREQAENIIHLFTLTNLGAPAAFKYFDTTIDRKRYTSTKEVLDATLIHQSITGLYETRIDLSQLGGDGGGSSGGGGGSGGTLQLDDEYRLYSPLVKPDQNIQFWLEQFPQAWAETAGMGLAKQVPPQVIQLKASATPVSVRQYPLSKEAQEGIRPHVQRLIQQGILVPVQSPWNTPLLPVRKPGTNDYRPVQDLREVNKRVQDIHPTVPNPYNLLCALPPQRSWYTVLDLKDAFFCLRLHPTSQPLFAFEWRDPGTGRTGQLTWTRLPQGFKNSPTIFDEALHRDLANFRIQHPQVTLLQYVDDLLLAGATKQDCLEGTKALLLELSDLGYRASAKKAQICRREVTYLGYSLRDGQRWLTEARKKTVVQIPAPTTAKQVREFLGTAGFCRLWIPGFATLAAPLYPLTKEKGEFSWAPEHQKAFDAIKKALLSAPALALPDVTKPFTLYVDERKGVARGVLTQTLGPWRRPVAYLSKKLDPVASGWPVCLKAIAAVAILVKDADKLTLGQNITVIAPHALENIVRQPPDRWMTNARMTHYQSLLLTERVTFAPPAALNPATLLPEETDEPVTHDCHQLLIEETGVRKDLTDIPLTGEVLTWFTDGSSYVVEGKRMAGAAVVDGTRTIWASSLPEGTSAQKAELMALTQALRLAEGKSINIYTDSRYAFATAHVHGAIYKQRGLLTSAGREIKNKEEILSLLEALHLPKRLAIIHCPGHQKAKDPISRGNQMADRVAKQAAQGVNLLAGKRTADGSEFEKRTADGSEFESPKKKAKVE

SEQ ID NO: 21580 - protein, 2090 aa, synthetic construct
MPAAKRVKLDGGDKKYSIGLDIGTNSVGWAVITDEYKVPSKKFKVLGNTDRHSIKKNLIGALLFDSGETAEATRLKRTARRRYTRRKNRICYLQEIFSNEMAKVDDSFFHRLEESFLVEEDKKHERHPIFGNIVDEVAYHEKYPTIYHLRKKLVDSTDKADLRLIYLALAHMIKFRGHFLIEGDLNPDNSDVDKLFIQLVQTYNQLFEENPINASGVDAKAILSARLSKSRRLENLIAQLPGEKKNGLFGNLIALSLGLTPNFKSNFDLAEDAKLQLSKDTYDDDLDNLLAQIGDQYADLFLAAKNLSDAILLSDILRVNTEITKAPLSASMIKRYDEHHQDLTLLKALVRQQLPEKYKEIFFDQSKNGYAGYIDGGASQEEFYKFIKPILEKMDGTEELLVKLNREDLLRKQRTFDNGSIPHQIHLGELHAILRRQEDFYPFLKDNREKIEKILTFRIPYYVGPLARGNSRFAWMTRKSEETITPWNFEEVVDKGASAQSFIERMTNFDKNLPNEKVLPKHSLLYEYFTVYNELTKVKYVTEGMRKPAFLSGEQKKAIVDLLFKTNRKVTVKQLKEDYFKKIECFDSVEISGVEDRFNASLGTYHDLLKIIKDKDFLDNEENEDILEDIVLTLTLFEDREMIEERLKTYAHLFDDKVMKQLKRRRYTGWGRLSRKLINGIRDKQSGKTILDFLKSDGFANRNFMQLIHDDSLTFKEDIQKAQVSGQGDSLHEHIANLAGSPAIKKGILQTVKVVDELVKVMGRHKPENIVIEMARENQTTQKGQKNSRERMKRIEEGIKELGSQILKEHPVENTQLQNEKLYLYYLQNGRDMYVDQELDINRLSDYDVDHIVPQSFLKDDSIDNKVLTRSDKARGKSDNVPSEEVVKKMKNYWRQLLNAKLITQRKFDNLTKAERGGLSELDKAGFIKRQLVETRQITKHVAQILDSRMNTKYDENDKLIREVKVITLKSKLVSDFRKDFQFYKVREINNYHHAHDAYLNAVVGTALIKKYPKLESEFVYGDYKVYDVRKMIAKSEQEIGKATAKYFFYSNIMNFFKTEITLANGEIRKRPLIETNGETGEIVWDKGRDFATVRKVLSMPQVNIVKKTEVQTGGFSKESILPKRNSDKLIARKKDWDPKKYGGFDSPTVAYSVLVVAKVEKGKSKKLKSVKELLGITIMERSSFEKNPIDFLEAKGYKEVKKDLIIKLPKYSLFELENGRKRMLASAGELQKGNELALPSKYVNFLYLASHYEKLKGSPEDNEQKQLFVEQHKHYLDEIIEQISEFSKRVILADANLDKVLSAYNKHRDKPIREQAENIIHLFTLTNLGAPAAFKYFDTTIDRKRYTSTKEVLDATLIHQSITGLYETRIDLSQLGGDGGGSSEAAAKGGGGGTLQLDDEYRLYSPLVKPDQNIQFWLEQFPQAWAETAGMGLAKQVPPQVIQLKASATPVSVRQYPLSKEAQEGIRPHVQRLIQQGILVPVQSPWNTPLLPVRKPGTNDYRPVQDLREVNKRVQDIHPTVPNPYNLLCALPPQRSWYTVLDLKDAFFCLRLHPTSQPLFAFEWRDPGTGRTGQLTWTRLPQGFKNSPTIFDEALHRDLANFRIQHPQVTLLQYVDDLLLAGATKQDCLEGTKALLLELSDLGYRASAKKAQICRREVTYLGYSLRDGQRWLTEARKKTVVQIPAPTTAKQVREFLGTAGFCRLWIPGFATLAAPLYPLTKEKGEFSWAPEHQKAFDAIKKALLSAPALALPDVTKPFTLYVDERKGVARGVLTQTLGPWRRPVAYLSKKLDPVASGWPVCLKAIAAVAILVKDADKLTLGQNITVIAPHALENIVRQPPDRWMTNARMTHYQSLLLTERVTFAPPAALNPATLLPEETDEPVTHDCHQLLIEETGVRKDLTDIPLTGEVLTWFTDGSSYVVEGKRMAGAAVVDGTRTIWASSLPEGTSAQKAELMALTQALRLAEGKSINIYTDSRYAFATAHVHGAIYKQRGLLTSAGREIKNKEEILSLLEALHLPKRLAIIHCPGHQKAKDPISRGNQMADRVAKQAAQGVNLLAGKRTADGSEFEKRTADGSEFESPKKKAKVE

SEQ ID NO: 21581 - protein, 2090 aa, synthetic construct
MPAAKRVKLDGGDKKYSIGLDIGTNSVGWAVITDEYKVPSKKFKVLGNTDRHSIKKNLIGALLFDSGETAEATRLKRTARRRYTRRKNRICYLQEIFSNEMAKVDDSFFHRLEESFLVEEDKKHERHPIFGNIVDEVAYHEKYPTIYHLRKKLVDSTDKADLRLIYLALAHMIKFRGHFLIEGDLNPDNSDVDKLFIQLVQTYNQLFEENPINASGVDAKAILSARLSKSRRLENLIAQLPGEKKNGLFGNLIALSLGLTPNFKSNFDLAEDAKLQLSKDTYDDDLDNLLAQIGDQYADLFLAAKNLSDAILLSDILRVNTEITKAPLSASMIKRYDEHHQDLTLLKALVRQQLPEKYKEIFFDQSKNGYAGYIDGGASQEEFYKFIKPILEKMDGTEELLVKLNREDLLRKQRTFDNGSIPHQIHLGELHAILRRQEDFYPFLKDNREKIEKILTFRIPYYVGPLARGNSRFAWMTRKSEETITPWNFEEVVDKGASAQSFIERMTNFDKNLPNEKVLPKHSLLYEYFTVYNELTKVKYVTEGMRKPAFLSGEQKKAIVDLLFKTNRKVTVKQLKEDYFKKIECFDSVEISGVEDRFNASLGTYHDLLKIIKDKDFLDNEENEDILEDIVLTLTLFEDREMIEERLKTYAHLFDDKVMKQLKRRRYTGWGRLSRKLINGIRDKQSGKTILDFLKSDGFANRNFMQLIHDDSLTFKEDIQKAQVSGQGDSLHEHIANLAGSPAIKKGILQTVKVVDELVKVMGRHKPENIVIEMARENQTTQKGQKNSRERMKRIEEGIKELGSQILKEHPVENTQLQNEKLYLYYLQNGRDMYVDQELDINRLSDYDVDHIVPQSFLKDDSIDNKVLTRSDKARGKSDNVPSEEVVKKMKNYWRQLLNAKLITQRKFDNLTKAERGGLSELDKAGFIKRQLVETRQITKHVAQILDSRMNTKYDENDKLIREVKVITLKSKLVSDFRKDFQFYKVREINNYHHAHDAYLNAVVGTALIKKYPKLESEFVYGDYKVYDVRKMIAKSEQEIGKATAKYFFYSNIMNFFKTEITLANGEIRKRPLIETNGETGEIVWDKGRDFATVRKVLSMPQVNIVKKTEVQTGGFSKESILPKRNSDKLIARKKDWDPKKYGGFDSPTVAYSVLVVAKVEKGKSKKLKSVKELLGITIMERSSFEKNPIDFLEAKGYKEVKKDLIIKLPKYSLFELENGRKRMLASAGELQKGNELALPSKYVNFLYLASHYEKLKGSPEDNEQKQLFVEQHKHYLDEIIEQISEFSKRVILADANLDKVLSAYNKHRDKPIREQAENIIHLFTLTNLGAPAAFKYFDTTIDRKRYTSTKEVLDATLIHQSITGLYETRIDLSQLGGDGGGGSGGGEAAAKGGTLQLDDEYRLYSPLVKPDQNIQFWLEQFPQAWAETAGMGLAKQVPPQVIQLKASATPVSVRQYPLSKEAQEGIRPHVQRLIQQGILVPVQSPWNTPLLPVRKPGTNDYRPVQDLREVNKRVQDIHPTVPNPYNLLCALPPQRSWYTVLDLKDAFFCLRLHPTSQPLFAFEWRDPGTGRTGQLTWTRLPQGFKNSPTIFDEALHRDLANFRIQHPQVTLLQYVDDLLLAGATKQDCLEGTKALLLELSDLGYRASAKKAQICRREVTYLGYSLRDGQRWLTEARKKTVVQIPAPTTAKQVREFLGTAGFCRLWIPGFATLAAPLYPLTKEKGEFSWAPEHQKAFDAIKKALLSAPALALPDVTKPFTLYVDERKGVARGVLTQTLGPWRRPVAYLSKKLDPVASGWPVCLKAIAAVAILVKDADKLTLGQNITVIAPHALENIVRQPPDRWMTNARMTHYQSLLLTERVTFAPPAALNPATLLPEETDEPVTHDCHQLLIEETGVRKDLTDIPLTGEVLTWFTDGSSYVVEGKRMAGAAVVDGTRTIWASSLPEGTSAQKAELMALTQALRLAEGKSINIYTDSRYAFATAHVHGAIYKQRGLLTSAGREIKNKEEILSLLEALHLPKRLAIIHCPGHQKAKDPISRGNQMADRVAKQAAQGVNLLAGKRTADGSEFEKRTADGSEFESPKKKAKVE

SEQ ID NO: 21582 - protein, 2090 aa, synthetic construct
MPAAKRVKLDGGDKKYSIGLDIGTNSVGWAVITDEYKVPSKKFKVLGNTDRHSIKKNLIGALLFDSGETAEATRLKRTARRRYTRRKNRICYLQEIFSNEMAKVDDSFFHRLEESFLVEEDKKHERHPIFGNIVDEVAYHEKYPTIYHLRKKLVDSTDKADLRLIYLALAHMIKFRGHFLIEGDLNPDNSDVDKLFIQLVQTYNQLFEENPINASGVDAKAILSARLSKSRRLENLIAQLPGEKKNGLFGNLIALSLGLTPNFKSNFDLAEDAKLQLSKDTYDDDLDNLLAQIGDQYADLFLAAKNLSDAILLSDILRVNTEITKAPLSASMIKRYDEHHQDLTLLKALVRQQLPEKYKEIFFDQSKNGYAGYIDGGASQEEFYKFIKPILEKMDGTEELLVKLNREDLLRKQRTFDNGSIPHQIHLGELHAILRRQEDFYPFLKDNREKIEKILTFRIPYYVGPLARGNSRFAWMTRKSEETITPWNFEEVVDKGASAQSFIERMTNFDKNLPNEKVLPKHSLLYEYFTVYNELTKVKYVTEGMRKPAFLSGEQKKAIVDLLFKTNRKVTVKQLKEDYFKKIECFDSVEISGVEDRFNASLGTYHDLLKIIKDKDFLDNEENEDILEDIVLTLTLFEDREMIEERLKTYAHLFDDKVMKQLKRRRYTGWGRLSRKLINGIRDKQSGKTILDFLKSDGFANRNFMQLIHDDSLTFKEDIQKAQVSGQGDSLHEHIANLAGSPAIKKGILQTVKVVDELVKVMGRHKPENIVIEMARENQTTQKGQKNSRERMKRIEEGIKELGSQILKEHPVENTQLQNEKLYLYYLQNGRDMYVDQELDINRLSDYDVDHIVPQSFLKDDSIDNKVLTRSDKARGKSDNVPSEEVVKKMKNYWRQLLNAKLITQRKFDNLTKAERGGLSELDKAGFIKRQLVETRQITKHVAQILDSRMNTKYDENDKLIREVKVITLKSKLVSDFRKDFQFYKVREINNYHHAHDAYLNAVVGTALIKKYPKLESEFVYGDYKVYDVRKMIAKSEQEIGKATAKYFFYSNIMNFFKTEITLANGEIRKRPLIETNGETGEIVWDKGRDFATVRKVLSMPQVNIVKKTEVQTGGFSKESILPKRNSDKLIARKKDWDPKKYGGFDSPTVAYSVLVVAKVEKGKSKKLKSVKELLGITIMERSSFEKNPIDFLEAKGYKEVKKDLIIKLPKYSLFELENGRKRMLASAGELQKGNELALPSKYVNFLYLASHYEKLKGSPEDNEQKQLFVEQHKHYLDEIIEQISEFSKRVILADANLDKVLSAYNKHRDKPIREQAENIIHLFTLTNLGAPAAFKYFDTTIDRKRYTSTKEVLDATLIHQSITGLYETRIDLSQLGGDGGEAAAKPAPGGSGGTLQLDDEYRLYSPLVKPDQNIQFWLEQFPQAWAETAGMGLAKQVPPQVIQLKASATPVSVRQYPLSKEAQEGIRPHVQRLIQQGILVPVQSPWNTPLLPVRKPGTNDYRPVQDLREVNKRVQDIHPTVPNPYNLLCALPPQRSWYTVLDLKDAFFCLRLHPTSQPLFAFEWRDPGTGRTGQLTWTRLPQGFKNSPTIFDEALHRDLANFRIQHPQVTLLQYVDDLLLAGATKQDCLEGTKALLLELSDLGYRASAKKAQICRREVTYLGYSLRDGQRWLTEARKKTVVQIPAPTTAKQVREFLGTAGFCRLWIPGFATLAAPLYPLTKEKGEFSWAPEHQKAFDAIKKALLSAPALALPDVTKPFTLYVDERKGVARGVLTQTLGPWRRPVAYLSKKLDPVASGWPVCLKAIAAVAILVKDADKLTLGQNITVIAPHALENIVRQPPDRWMTNARMTHYQSLLLTERVTFAPPAALNPATLLPEETDEPVTHDCHQLLIEETGVRKDLTDIPLTGEVLTWFTDGSSYVVEGKRMAGAAVVDGTRTIWASSLPEGTSAQKAELMALTQALRLAEGKSINIYTDSRYAFATAHVHGAIYKQRGLLTSAGREIKNKEEILSLLEALHLPKRLAIIHCPGHQKAKDPISRGNQMADRVAKQAAQGVNLLAGKRTADGSEFEKRTADGSEFESPKKKAKVE

SEQ ID NO: 21583 - protein, 2090 aa, synthetic construct
MPAAKRVKLDGGDKKYSIGLDIGTNSVGWAVITDEYKVPSKKFKVLGNTDRHSIKKNLIGALLFDSGETAEATRLKRTARRRYTRRKNRICYLQEIFSNEMAKVDDSFFHRLEESFLVEEDKKHERHPIFGNIVDEVAYHEKYPTIYHLRKKLVDSTDKADLRLIYLALAHMIKFRGHFLIEGDLNPDNSDVDKLFIQLVQTYNQLFEENPINASGVDAKAILSARLSKSRRLENLIAQLPGEKKNGLFGNLIALSLGLTPNFKSNFDLAEDAKLQLSKDTYDDDLDNLLAQIGDQYADLFLAAKNLSDAILLSDILRVNTEITKAPLSASMIKRYDEHHQDLTLLKALVRQQLPEKYKEIFFDQSKNGYAGYIDGGASQEEFYKFIKPILEKMDGTEELLVKLNREDLLRKQRTFDNGSIPHQIHLGELHAILRRQEDFYPFLKDNREKIEKILTFRIPYYVGPLARGNSRFAWMTRKSEETITPWNFEEVVDKGASAQSFIERMTNFDKNLPNEKVLPKHSLLYEYFTVYNELTKVKYVTEGMRKPAFLSGEQKKAIVDLLFKTNRKVTVKQLKEDYFKKIECFDSVEISGVEDRFNASLGTYHDLLKIIKDKDFLDNEENEDILEDIVLTLTLFEDREMIEERLKTYAHLFDDKVMKQLKRRRYTGWGRLSRKLINGIRDKQSGKTILDFLKSDGFANRNFMQLIHDDSLTFKEDIQKAQVSGQGDSLHEHIANLAGSPAIKKGILQTVKVVDELVKVMGRHKPENIVIEMARENQTTQKGQKNSRERMKRIEEGIKELGSQILKEHPVENTQLQNEKLYLYYLQNGRDMYVDQELDINRLSDYDVDHIVPQSFLKDDSIDNKVLTRSDKARGKSDNVPSEEVVKKMKNYWRQLLNAKLITQRKFDNLTKAERGGLSELDKAGFIKRQLVETRQITKHVAQILDSRMNTKYDENDKLIREVKVITLKSKLVSDFRKDFQFYKVREINNYHHAHDAYLNAVVGTALIKKYPKLESEFVYGDYKVYDVRKMIAKSEQEIGKATAKYFFYSNIMNFFKTEITLANGEIRKRPLIETNGETGEIVWDKGRDFATVRKVLSMPQVNIVKKTEVQTGGFSKESILPKRNSDKLIARKKDWDPKKYGGFDSPTVAYSVLVVAKVEKGKSKKLKSVKELLGITIMERSSFEKNPIDFLEAKGYKEVKKDLIIKLPKYSLFELENGRKRMLASAGELQKGNELALPSKYVNFLYLASHYEKLKGSPEDNEQKQLFVEQHKHYLDEIIEQISEFSKRVILADANLDKVLSAYNKHRDKPIREQAENIIHLFTLTNLGAPAAFKYFDTTIDRKRYTSTKEVLDATLIHQSITGLYETRIDLSQLGGDGGEAAAKGGGGGSGGTLQLDDEYRLYSPLVKPDQNIQFWLEQFPQAWAETAGMGLAKQVPPQVIQLKASATPVSVRQYPLSKEAQEGIRPHVQRLIQQGILVPVQSPWNTPLLPVRKPGTNDYRPVQDLREVNKRVQDIHPTVPNPYNLLCALPPQRSWYTVLDLKDAFFCLRLHPTSQPLFAFEWRDPGTGRTGQLTWTRLPQGFKNSPTIFDEALHRDLANFRIQHPQVTLLQYVDDLLLAGATKQDCLEGTKALLLELSDLGYRASAKKAQICRREVTYLGYSLRDGQRWLTEARKKTVVQIPAPTTAKQVREFLGTAGFCRLWIPGFATLAAPLYPLTKEKGEFSWAPEHQKAFDAIKKALLSAPALALPDVTKPFTLYVDERKGVARGVLTQTLGPWRRPVAYLSKKLDPVASGWPVCLKAIAAVAILVKDADKLTLGQNITVIAPHALENIVRQPPDRWMTNARMTHYQSLLLTERVTFAPPAALNPATLLPEETDEPVTHDCHQLLIEETGVRKDLTDIPLTGEVLTWFTDGSSYVVEGKRMAGAAVVDGTRTIWASSLPEGTSAQKAELMALTQALRLAEGKSINIYTDSRYAFATAHVHGAIYKQRGLLTSAGREIKNKEEILSLLEALHLPKRLAIIHCPGHQKAKDPISRGNQMADRVAKQAAQGVNLLAGKRTADGSEFEKRTADGSEFESPKKKAKVE

SEQ ID NO: 21584 - protein, 2082 aa, synthetic construct
MPAAKRVKLDGGDKKYSIGLDIGTNSVGWAVITDEYKVPSKKFKVLGNTDRHSIKKNLIGALLFDSGETAEATRLKRTARRRYTRRKNRICYLQEIFSNEMAKVDDSFFHRLEESFLVEEDKKHERHPIFGNIVDEVAYHEKYPTIYHLRKKLVDSTDKADLRLIYLALAHMIKFRGHFLIEGDLNPDNSDVDKLFIQLVQTYNQLFEENPINASGVDAKAILSARLSKSRRLENLIAQLPGEKKNGLFGNLIALSLGLTPNFKSNFDLAEDAKLQLSKDTYDDDLDNLLAQIGDQYADLFLAAKNLSDAILLSDILRVNTEITKAPLSASMIKRYDEHHQDLTLLKALVRQQLPEKYKEIFFDQSKNGYAGYIDGGASQEEFYKFIKPILEKMDGTEELLVKLNREDLLRKQRTFDNGSIPHQIHLGELHAILRRQEDFYPFLKDNREKIEKILTFRIPYYVGPLARGNSRFAWMTRKSEETITPWNFEEVVDKGASAQSFIERMTNFDKNLPNEKVLPKHSLLYEYFTVYNELTKVKYVTEGMRKPAFLSGEQKKAIVDLLFKTNRKVTVKQLKEDYFKKIECFDSVEISGVEDRFNASLGTYHDLLKIIKDKDFLDNEENEDILEDIVLTLTLFEDREMIEERLKTYAHLFDDKVMKQLKRRRYTGWGRLSRKLINGIRDKQSGKTILDFLKSDGFANRNFMQLIHDDSLTFKEDIQKAQVSGQGDSLHEHIANLAGSPAIKKGILQTVKVVDELVKVMGRHKPENIVIEMARENQTTQKGQKNSRERMKRIEEGIKELGSQILKEHPVENTQLQNEKLYLYYLQNGRDMYVDQELDINRLSDYDVDHIVPQSFLKDDSIDNKVLTRSDKARGKSDNVPSEEVVKKMKNYWRQLLNAKLITQRKFDNLTKAERGGLSELDKAGFIKRQLVETRQITKHVAQILDSRMNTKYDENDKLIREVKVITLKSKLVSDFRKDFQFYKVREINNYHHAHDAYLNAVVGTALIKKYPKLESEFVYGDYKVYDVRKMIAKSEQEIGKATAKYFFYSNIMNFFKTEITLANGEIRKRPLIETNGETGEIVWDKGRDFATVRKVLSMPQVNIVKKTEVQTGGFSKESILPKRNSDKLIARKKDWDPKKYGGFDSPTVAYSVLVVAKVEKGKSKKLKSVKELLGITIMERSSFEKNPIDFLEAKGYKEVKKDLIIKLPKYSLFELENGRKRMLASAGELQKGNELALPSKYVNFLYLASHYEKLKGSPEDNEQKQLFVEQHKHYLDEIIEQISEFSKRVILADANLDKVLSAYNKHRDKPIREQAENIIHLFTLTNLGAPAAFKYFDTTIDRKRYTSTKEVLDATLIHQSITGLYETRIDLSQLGGDGGGGGGGTLQLDDEYRLYSPLVKPDQNIQFWLEQFPQAWAETAGMGLAKQVPPQVIQLKASATPVSVRQYPLSKEAQEGIRPHVQRLIQQGILVPVQSPWNTPLLPVRKPGTNDYRPVQDLREVNKRVQDIHPTVPNPYNLLCALPPQRSWYTVLDLKDAFFCLRLHPTSQPLFAFEWRDPGTGRTGQLTWTRLPQGFKNSPTIFDEALHRDLANFRIQHPQVTLLQYVDDLLLAGATKQDCLEGTKALLLELSDLGYRASAKKAQICRREVTYLGYSLRDGQRWLTEARKKTVVQIPAPTTAKQVREFLGTAGFCRLWIPGFATLAAPLYPLTKEKGEFSWAPEHQKAFDAIKKALLSAPALALPDVTKPFTLYVDERKGVARGVLTQTLGPWRRPVAYLSKKLDPVASGWPVCLKAIAAVAILVKDADKLTLGQNITVIAPHALENIVRQPPDRWMTNARMTHYQSLLLTERVTFAPPAALNPATLLPEETDEPVTHDCHQLLIEETGVRKDLTDIPLTGEVLTWFTDGSSYVVEGKRMAGAAVVDGTRTIWASSLPEGTSAQKAELMALTQALRLAEGKSINIYTDSRYAFATAHVHGAIYKQRGLLTSAGREIKNKEEILSLLEALHLPKRLAIIHCPGHQKAKDPISRGNQMADRVAKQAAQGVNLLAGKRTADGSEFEKRTADGSEFESPKKKAKVE

SEQ ID NO: 21585 - protein, 2090 aa, synthetic construct
MPAAKRVKLDGGDKKYSIGLDIGTNSVGWAVITDEYKVPSKKFKVLGNTDRHSIKKNLIGALLFDSGETAEATRLKRTARRRYTRRKNRICYLQEIFSNEMAKVDDSFFHRLEESFLVEEDKKHERHPIFGNIVDEVAYHEKYPTIYHLRKKLVDSTDKADLRLIYLALAHMIKFRGHFLIEGDLNPDNSDVDKLFIQLVQTYNQLFEENPINASGVDAKAILSARLSKSRRLENLIAQLPGEKKNGLFGNLIALSLGLTPNFKSNFDLAEDAKLQLSKDTYDDDLDNLLAQIGDQYADLFLAAKNLSDAILLSDILRVNTEITKAPLSASMIKRYDEHHQDLTLLKALVRQQLPEKYKEIFFDQSKNGYAGYIDGGASQEEFYKFIKPILEKMDGTEELLVKLNREDLLRKQRTFDNGSIPHQIHLGELHAILRRQEDFYPFLKDNREKIEKILTFRIPYYVGPLARGNSRFAWMTRKSEETITPWNFEEVVDKGASAQSFIERMTNFDKNLPNEKVLPKHSLLYEYFTVYNELTKVKYVTEGMRKPAFLSGEQKKAIVDLLFKTNRKVTVKQLKEDYFKKIECFDSVEISGVEDRFNASLGTYHDLLKIIKDKDFLDNEENEDILEDIVLTLTLFEDREMIEERLKTYAHLFDDKVMKQLKRRRYTGWGRLSRKLINGIRDKQSGKTILDFLKSDGFANRNFMQLIHDDSLTFKEDIQKAQVSGQGDSLHEHIANLAGSPAIKKGILQTVKVVDELVKVMGRHKPENIVIEMARENQTTQKGQKNSRERMKRIEEGIKELGSQILKEHPVENTQLQNEKLYLYYLQNGRDMYVDQELDINRLSDYDVDHIVPQSFLKDDSIDNKVLTRSDKARGKSDNVPSEEVVKKMKNYWRQLLNAKLITQRKFDNLTKAERGGLSELDKAGFIKRQLVETRQITKHVAQILDSRMNTKYDENDKLIREVKVITLKSKLVSDFRKDFQFYKVREINNYHHAHDAYLNAVVGTALIKKYPKLESEFVYGDYKVYDVRKMIAKSEQEIGKATAKYFFYSNIMNFFKTEITLANGEIRKRPLIETNGETGEIVWDKGRDFATVRKVLSMPQVNIVKKTEVQTGGFSKESILPKRNSDKLIARKKDWDPKKYGGFDSPTVAYSVLVVAKVEKGKSKKLKSVKELLGITIMERSSFEKNPIDFLEAKGYKEVKKDLIIKLPKYSLFELENGRKRMLASAGELQKGNELALPSKYVNFLYLASHYEKLKGSPEDNEQKQLFVEQHKHYLDEIIEQISEFSKRVILADANLDKVLSAYNKHRDKPIREQAENIIHLFTLTNLGAPAAFKYFDTTIDRKRYTSTKEVLDATLIHQSITGLYETRIDLSQLGGDGGEAAAKGGGGSSGGTLQLDDEYRLYSPLVKPDQNIQFWLEQFPQAWAETAGMGLAKQVPPQVIQLKASATPVSVRQYPLSKEAQEGIRPHVQRLIQQGILVPVQSPWNTPLLPVRKPGTNDYRPVQDLREVNKRVQDIHPTVPNPYNLLCALPPQRSWYTVLDLKDAFFCLRLHPTSQPLFAFEWRDPGTGRTGQLTWTRLPQGFKNSPTIFDEALHRDLANFRIQHPQVTLLQYVDDLLLAGATKQDCLEGTKALLLELSDLGYRASAKKAQICRREVTYLGYSLRDGQRWLTEARKKTVVQIPAPTTAKQVREFLGTAGFCRLWIPGFATLAAPLYPLTKEKGEFSWAPEHQKAFDAIKKALLSAPALALPDVTKPFTLYVDERKGVARGVLTQTLGPWRRPVAYLSKKLDPVASGWPVCLKAIAAVAILVKDADKLTLGQNITVIAPHALENIVRQPPDRWMTNARMTHYQSLLLTERVTFAPPAALNPATLLPEETDEPVTHDCHQLLIEETGVRKDLTDIPLTGEVLTWFTDGSSYVVEGKRMAGAAVVDGTRTIWASSLPEGTSAQKAELMALTQALRLAEGKSINIYTDSRYAFATAHVHGAIYKQRGLLTSAGREIKNKEEILSLLEALHLPKRLAIIHCPGHQKAKDPISRGNQMADRVAKQAAQGVNLLAGKRTADGSEFEKRTADGSEFESPKKKAKVE

SEQ ID NO: 21586 - protein, 2083 aa, synthetic construct
MPAAKRVKLDGGDKKYSIGLDIGTNSVGWAVITDEYKVPSKKFKVLGNTDRHSIKKNLIGALLFDSGETAEATRLKRTARRRYTRRKNRICYLQEIFSNEMAKVDDSFFHRLEESFLVEEDKKHERHPIFGNIVDEVAYHEKYPTIYHLRKKLVDSTDKADLRLIYLALAHMIKFRGHFLIEGDLNPDNSDVDKLFIQLVQTYNQLFEENPINASGVDAKAILSARLSKSRRLENLIAQLPGEKKNGLFGNLIALSLGLTPNFKSNFDLAEDAKLQLSKDTYDDDLDNLLAQIGDQYADLFLAAKNLSDAILLSDILRVNTEITKAPLSASMIKRYDEHHQDLTLLKALVRQQLPEKYKEIFFDQSKNGYAGYIDGGASQEEFYKFIKPILEKMDGTEELLVKLNREDLLRKQRTFDNGSIPHQIHLGELHAILRRQEDFYPFLKDNREKIEKILTFRIPYYVGPLARGNSRFAWMTRKSEETITPWNFEEVVDKGASAQSFIERMTNFDKNLPNEKVLPKHSLLYEYFTVYNELTKVKYVTEGMRKPAFLSGEQKKAIVDLLFKTNRKVTVKQLKEDYFKKIECFDSVEISGVEDRFNASLGTYHDLLKIIKDKDFLDNEENEDILEDIVLTLTLFEDREMIEERLKTYAHLFDDKVMKQLKRRRYTGWGRLSRKLINGIRDKQSGKTILDFLKSDGFANRNFMQLIHDDSLTFKEDIQKAQVSGQGDSLHEHIANLAGSPAIKKGILQTVKVVDELVKVMGRHKPENIVIEMARENQTTQKGQKNSRERMKRIEEGIKELGSQILKEHPVENTQLQNEKLYLYYLQNGRDMYVDQELDINRLSDYDVDHIVPQSFLKDDSIDNKVLTRSDKARGKSDNVPSEEVVKKMKNYWRQLLNAKLITQRKFDNLTKAERGGLSELDKAGFIKRQLVETRQITKHVAQILDSRMNTKYDENDKLIREVKVITLKSKLVSDFRKDFQFYKVREINNYHHAHDAYLNAVVGTALIKKYPKLESEFVYGDYKVYDVRKMIAKSEQEIGKATAKYFFYSNIMNFFKTEITLANGEIRKRPLIETNGETGEIVWDKGRDFATVRKVLSMPQVNIVKKTEVQTGGFSKESILPKRNSDKLIARKKDWDPKKYGGFDSPTVAYSVLVVAKVEKGKSKKLKSVKELLGITIMERSSFEKNPIDFLEAKGYKEVKKDLIIKLPKYSLFELENGRKRMLASAGELQKGNELALPSKYVNFLYLASHYEKLKGSPEDNEQKQLFVEQHKHYLDEIIEQISEFSKRVILADANLDKVLSAYNKHRDKPIREQAENIIHLFTLTNLGAPAAFKYFDTTIDRKRYTSTKEVLDATLIHQSITGLYETRIDLSQLGGDGGGGGGGGTLQLDDEYRLYSPLVKPDQNIQFWLEQFPQAWAETAGMGLAKQVPPQVIQLKASATPVSVRQYPLSKEAQEGIRPHVQRLIQQGILVPVQSPWNTPLLPVRKPGTNDYRPVQDLREVNKRVQDIHPTVPNPYNLLCALPPQRSWYTVLDLKDAFFCLRLHPTSQPLFAFEWRDPGTGRTGQLTWTRLPQGFKNSPTIFDEALHRDLANFRIQHPQVTLLQYVDDLLLAGATKQDCLEGTKALLLELSDLGYRASAKKAQICRREVTYLGYSLRDGQRWLTEARKKTVVQIPAPTTAKQVREFLGTAGFCRLWIPGFATLAAPLYPLTKEKGEFSWAPEHQKAFDAIKKALLSAPALALPDVTKPFTLYVDERKGVARGVLTQTLGPWRRPVAYLSKKLDPVASGWPVCLKAIAAVAILVKDADKLTLGQNITVIAPHALENIVRQPPDRWMTNARMTHYQSLLLTERVTFAPPAALNPATLLPEETDEPVTHDCHQLLIEETGVRKDLTDIPLTGEVLTWFTDGSSYVVEGKRMAGAAVVDGTRTIWASSLPEGTSAQKAELMALTQALRLAEGKSINIYTDSRYAFATAHVHGAIYKQRGLLTSAGREIKNKEEILSLLEALHLPKRLAIIHCPGHQKAKDPISRGNQMADRVAKQAAQGVNLLAGKRTADGSEFEKRTADGSEFESPKKKAKVE

SEQ ID NO: 21587 - protein, 2097 aa, synthetic construct
MPAAKRVKLDGGDKKYSIGLDIGTNSVGWAVITDEYKVPSKKFKVLGNTDRHSIKKNLIGALLFDSGETAEATRLKRTARRRYTRRKNRICYLQEIFSNEMAKVDDSFFHRLEESFLVEEDKKHERHPIFGNIVDEVAYHEKYPTIYHLRKKLVDSTDKADLRLIYLALAHMIKFRGHFLIEGDLNPDNSDVDKLFIQLVQTYNQLFEENPINASGVDAKAILSARLSKSRRLENLIAQLPGEKKNGLFGNLIALSLGLTPNFKSNFDLAEDAKLQLSKDTYDDDLDNLLAQIGDQYADLFLAAKNLSDAILLSDILRVNTEITKAPLSASMIKRYDEHHQDLTLLKALVRQQLPEKYKEIFFDQSKNGYAGYIDGGASQEEFYKFIKPILEKMDGTEELLVKLNREDLLRKQRTFDNGSIPHQIHLGELHAILRRQEDFYPFLKDNREKIEKILTFRIPYYVGPLARGNSRFAWMTRKSEETITPWNFEEVVDKGASAQSFIERMTNFDKNLPNEKVLPKHSLLYEYFTVYNELTKVKYVTEGMRKPAFLSGEQKKAIVDLLFKTNRKVTVKQLKEDYFKKIECFDSVEISGVEDRFNASLGTYHDLLKIIKDKDFLDNEENEDILEDIVLTLTLFEDREMIEERLKTYAHLFDDKVMKQLKRRRYTGWGRLSRKLINGIRDKQSGKTILDFLKSDGFANRNFMQLIHDDSLTFKEDIQKAQVSGQGDSLHEHIANLAGSPAIKKGILQTVKVVDELVKVMGRHKPENIVIEMARENQTTQKGQKNSRERMKRIEEGIKELGSQILKEHPVENTQLQNEKLYLYYLQNGRDMYVDQELDINRLSDYDVDHIVPQSFLKDDSIDNKVLTRSDKARGKSDNVPSEEVVKKMKNYWRQLLNAKLITQRKFDNLTKAERGGLSELDKAGFIKRQLVETRQITKHVAQILDSRMNTKYDENDKLIREVKVITLKSKLVSDFRKDFQFYKVREINNYHHAHDAYLNAVVGTALIKKYPKLESEFVYGDYKVYDVRKMIAKSEQEIGKATAKYFFYSNIMNFFKTEITLANGEIRKRPLIETNGETGEIVWDKGRDFATVRKVLSMPQVNIVKKTEVQTGGFSKESILPKRNSDKLIARKKDWDPKKYGGFDSPTVAYSVLVVAKVEKGKSKKLKSVKELLGITIMERSSFEKNPIDFLEAKGYKEVKKDLIIKLPKYSLFELENGRKRMLASAGELQKGNELALPSKYVNFLYLASHYEKLKGSPEDNEQKQLFVEQHKHYLDEIIEQISEFSKRVILADANLDKVLSAYNKHRDKPIREQAENIIHLFTLTNLGAPAAFKYFDTTIDRKRYTSTKEVLDATLIHQSITGLYETRIDLSQLGGDGGGGSGGSGGSGGSGGSGGSGGTLQLDDEYRLYSPLVKPDQNIQFWLEQFPQAWAETAGMGLAKQVPPQVIQLKASATPVSVRQYPLSKEAQEGIRPHVQRLIQQGILVPVQSPWNTPLLPVRKPGTNDYRPVQDLREVNKRVQDIHPTVPNPYNLLCALPPQRSWYTVLDLKDAFFCLRLHPTSQPLFAFEWRDPGTGRTGQLTWTRLPQGFKNSPTIFDEALHRDLANFRIQHPQVTLLQYVDDLLLAGATKQDCLEGTKALLLELSDLGYRASAKKAQICRREVTYLGYSLRDGQRWLTEARKKTVVQIPAPTTAKQVREFLGTAGFCRLWIPGFATLAAPLYPLTKEKGEFSWAPEHQKAFDAIKKALLSAPALALPDVTKPFTLYVDERKGVARGVLTQTLGPWRRPVAYLSKKLDPVASGWPVCLKAIAAVAILVKDADKLTLGQNITVIAPHALENIVRQPPDRWMTNARMTHYQSLLLTERVTFAPPAALNPATLLPEETDEPVTHDCHQLLIEETGVRKDLTDIPLTGEVLTWFTDGSSYVVEGKRMAGAAVVDGTRTIWASSLPEGTSAQKAELMALTQALRLAEGKSINIYTDSRYAFATAHVHGAIYKQRGLLTSAGREIKNKEEILSLLEALHLPKRLAIIHCPGHQKAKDPISRGNQMADRVAKQAAQGVNLLAGKRTADGSEFEKRTADGSEFESPKKKAKVE

SEQ ID NO: 21588 - protein, 2087 aa, synthetic construct
MPAAKRVKLDGGDKKYSIGLDIGTNSVGWAVITDEYKVPSKKFKVLGNTDRHSIKKNLIGALLFDSGETAEATRLKRTARRRYTRRKNRICYLQEIFSNEMAKVDDSFFHRLEESFLVEEDKKHERHPIFGNIVDEVAYHEKYPTIYHLRKKLVDSTDKADLRLIYLALAHMIKFRGHFLIEGDLNPDNSDVDKLFIQLVQTYNQLFEENPINASGVDAKAILSARLSKSRRLENLIAQLPGEKKNGLFGNLIALSLGLTPNFKSNFDLAEDAKLQLSKDTYDDDLDNLLAQIGDQYADLFLAAKNLSDAILLSDILRVNTEITKAPLSASMIKRYDEHHQDLTLLKALVRQQLPEKYKEIFFDQSKNGYAGYIDGGASQEEFYKFIKPILEKMDGTEELLVKLNREDLLRKQRTFDNGSIPHQIHLGELHAILRRQEDFYPFLKDNREKIEKILTFRIPYYVGPLARGNSRFAWMTRKSEETITPWNFEEVVDKGASAQSFIERMTNFDKNLPNEKVLPKHSLLYEYFTVYNELTKVKYVTEGMRKPAFLSGEQKKAIVDLLFKTNRKVTVKQLKEDYFKKIECFDSVEISGVEDRFNASLGTYHDLLKIIKDKDFLDNEENEDILEDIVLTLTLFEDREMIEERLKTYAHLFDDKVMKQLKRRRYTGWGRLSRKLINGIRDKQSGKTILDFLKSDGFANRNFMQLIHDDSLTFKEDIQKAQVSGQGDSLHEHIANLAGSPAIKKGILQTVKVVDELVKVMGRHKPENIVIEMARENQTTQKGQKNSRERMKRIEEGIKELGSQILKEHPVENTQLQNEKLYLYYLQNGRDMYVDQELDINRLSDYDVDHIVPQSFLKDDSIDNKVLTRSDKARGKSDNVPSEEVVKKMKNYWRQLLNAKLITQRKFDNLTKAERGGLSELDKAGFIKRQLVETRQITKHVAQILDSRMNTKYDENDKLIREVKVITLKSKLVSDFRKDFQFYKVREINNYHHAHDAYLNAVVGTALIKKYPKLESEFVYGDYKVYDVRKMIAKSEQEIGKATAKYFFYSNIMNFFKTEITLANGEIRKRPLIETNGETGEIVWDKGRDFATVRKVLSMPQVNIVKKTEVQTGGFSKESILPKRNSDKLIARKKDWDPKKYGGFDSPTVAYSVLVVAKVEKGKSKKLKSVKELLGITIMERSSFEKNPIDFLEAKGYKEVKKDLIIKLPKYSLFELENGRKRMLASAGELQKGNELALPSKYVNFLYLASHYEKLKGSPEDNEQKQLFVEQHKHYLDEIIEQISEFSKRVILADANLDKVLSAYNKHRDKPIREQAENIIHLFTLTNLGAPAAFKYFDTTIDRKRYTSTKEVLDATLIHQSITGLYETRIDLSQLGGDGGGSSEAAAKGGTLQLDDEYRLYSPLVKPDQNIQFWLEQFPQAWAETAGMGLAKQVPPQVIQLKASATPVSVRQYPLSKEAQEGIRPHVQRLIQQGILVPVQSPWNTPLLPVRKPGTNDYRPVQDLREVNKRVQDIHPTVPNPYNLLCALPPQRSWYTVLDLKDAFFCLRLHPTSQPLFAFEWRDPGTGRTGQLTWTRLPQGFKNSPTIFDEALHRDLANFRIQHPQVTLLQYVDDLLLAGATKQDCLEGTKALLLELSDLGYRASAKKAQICRREVTYLGYSLRDGQRWLTEARKKTVVQIPAPTTAKQVREFLGTAGFCRLWIPGFATLAAPLYPLTKEKGEFSWAPEHQKAFDAIKKALLSAPALALPDVTKPFTLYVDERKGVARGVLTQTLGPWRRPVAYLSKKLDPVASGWPVCLKAIAAVAILVKDADKLTLGQNITVIAPHALENIVRQPPDRWMTNARMTHYQSLLLTERVTFAPPAALNPATLLPEETDEPVTHDCHQLLIEETGVRKDLTDIPLTGEVLTWFTDGSSYVVEGKRMAGAAVVDGTRTIWASSLPEGTSAQKAELMALTQALRLAEGKSINIYTDSRYAFATAHVHGAIYKQRGLLTSAGREIKNKEEILSLLEALHLPKRLAIIHCPGHQKAKDPISRGNQMADRVAKQAAQGVNLLAGKRTADGSEFEKRTADGSEFESPKKKAKVE

SEQ ID NO: 21589 - protein, 2088 aa, synthetic construct
MPAAKRVKLDGGDKKYSIGLDIGTNSVGWAVITDEYKVPSKKFKVLGNTDRHSIKKNLIGALLFDSGETAEATRLKRTARRRYTRRKNRICYLQEIFSNEMAKVDDSFFHRLEESFLVEEDKKHERHPIFGNIVDEVAYHEKYPTIYHLRKKLVDSTDKADLRLIYLALAHMIKFRGHFLIEGDLNPDNSDVDKLFIQLVQTYNQLFEENPINASGVDAKAILSARLSKSRRLENLIAQLPGEKKNGLFGNLIALSLGLTPNFKSNFDLAEDAKLQLSKDTYDDDLDNLLAQIGDQYADLFLAAKNLSDAILLSDILRVNTEITKAPLSASMIKRYDEHHQDLTLLKALVRQQLPEKYKEIFFDQSKNGYAGYIDGGASQEEFYKFIKPILEKMDGTEELLVKLNREDLLRKQRTFDNGSIPHQIHLGELHAILRRQEDFYPFLKDNREKIEKILTFRIPYYVGPLARGNSRFAWMTRKSEETITPWNFEEVVDKGASAQSFIERMTNFDKNLPNEKVLPKHSLLYEYFTVYNELTKVKYVTEGMRKPAFLSGEQKKAIVDLLFKTNRKVTVKQLKEDYFKKIECFDSVEISGVEDRFNASLGTYHDLLKIIKDKDFLDNEENEDILEDIVLTLTLFEDREMIEERLKTYAHLFDDKVMKQLKRRRYTGWGRLSRKLINGIRDKQSGKTILDFLKSDGFANRNFMQLIHDDSLTFKEDIQKAQVSGQGDSLHEHIANLAGSPAIKKGILQTVKVVDELVKVMGRHKPENIVIEMARENQTTQKGQKNSRERMKRIEEGIKELGSQILKEHPVENTQLQNEKLYLYYLQNGRDMYVDQELDINRLSDYDVDHIVPQSFLKDDSIDNKVLTRSDKARGKSDNVPSEEVVKKMKNYWRQLLNAKLITQRKFDNLTKAERGGLSELDKAGFIKRQLVETRQITKHVAQILDSRMNTKYDENDKLIREVKVITLKSKLVSDFRKDFQFYKVREINNYHHAHDAYLNAVVGTALIKKYPKLESEFVYGDYKVYDVRKMIAKSEQEIGKATAKYFFYSNIMNFFKTEITLANGEIRKRPLIETNGETGEIVWDKGRDFATVRKVLSMPQVNIVKKTEVQTGGFSKESILPKRNSDKLIARKKDWDPKKYGGFDSPTVAYSVLVVAKVEKGKSKKLKSVKELLGITIMERSSFEKNPIDFLEAKGYKEVKKDLIIKLPKYSLFELENGRKRMLASAGELQKGNELALPSKYVNFLYLASHYEKLKGSPEDNEQKQLFVEQHKHYLDEIIEQISEFSKRVILADANLDKVLSAYNKHRDKPIREQAENIIHLFTLTNLGAPAAFKYFDTTIDRKRYTSTKEVLDATLIHQSITGLYETRIDLSQLGGDGGGGSGGSGGSGGTLQLDDEYRLYSPLVKPDQNIQFWLEQFPQAWAETAGMGLAKQVPPQVIQLKASATPVSVRQYPLSKEAQEGIRPHVQRLIQQGILVPVQSPWNTPLLPVRKPGTNDYRPVQDLREVNKRVQDIHPTVPNPYNLLCALPPQRSWYTVLDLKDAFFCLRLHPTSQPLFAFEWRDPGTGRTGQLTWTRLPQGFKNSPTIFDEALHRDLANFRIQHPQVTLLQYVDDLLLAGATKQDCLEGTKALLLELSDLGYRASAKKAQICRREVTYLGYSLRDGQRWLTEARKKTVVQIPAPTTAKQVREFLGTAGFCRLWIPGFATLAAPLYPLTKEKGEFSWAPEHQKAFDAIKKALLSAPALALPDVTKPFTLYVDERKGVARGVLTQTLGPWRRPVAYLSKKLDPVASGWPVCLKAIAAVAILVKDADKLTLGQNITVIAPHALENIVRQPPDRWMTNARMTHYQSLLLTERVTFAPPAALNPATLLPEETDEPVTHDCHQLLIEETGVRKDLTDIPLTGEVLTWFTDGSSYVVEGKRMAGAAVVDGTRTIWASSLPEGTSAQKAELMALTQALRLAEGKSINIYTDSRYAFATAHVHGAIYKQRGLLTSAGREIKNKEEILSLLEALHLPKRLAIIHCPGHQKAKDPISRGNQMADRVAKQAAQGVNLLAGKRTADGSEFEKRTADGSEFESPKKKAKVE

SEQ ID NO: 21590 - protein, 2088 aa, synthetic construct
MPAAKRVKLDGGDKKYSIGLDIGTNSVGWAVITDEYKVPSKKFKVLGNTDRHSIKKNLIGALLFDSGETAEATRLKRTARRRYTRRKNRICYLQEIFSNEMAKVDDSFFHRLEESFLVEEDKKHERHPIFGNIVDEVAYHEKYPTIYHLRKKLVDSTDKADLRLIYLALAHMIKFRGHFLIEGDLNPDNSDVDKLFIQLVQTYNQLFEENPINASGVDAKAILSARLSKSRRLENLIAQLPGEKKNGLFGNLIALSLGLTPNFKSNFDLAEDAKLQLSKDTYDDDLDNLLAQIGDQYADLFLAAKNLSDAILLSDILRVNTEITKAPLSASMIKRYDEHHQDLTLLKALVRQQLPEKYKEIFFDQSKNGYAGYIDGGASQEEFYKFIKPILEKMDGTEELLVKLNREDLLRKQRTFDNGSIPHQIHLGELHAILRRQEDFYPFLKDNREKIEKILTFRIPYYVGPLARGNSRFAWMTRKSEETITPWNFEEVVDKGASAQSFIERMTNFDKNLPNEKVLPKHSLLYEYFTVYNELTKVKYVTEGMRKPAFLSGEQKKAIVDLLFKTNRKVTVKQLKEDYFKKIECFDSVEISGVEDRFNASLGTYHDLLKIIKDKDFLDNEENEDILEDIVLTLTLFEDREMIEERLKTYAHLFDDKVMKQLKRRRYTGWGRLSRKLINGIRDKQSGKTILDFLKSDGFANRNFMQLIHDDSLTFKEDIQKAQVSGQGDSLHEHIANLAGSPAIKKGILQTVKVVDELVKVMGRHKPENIVIEMARENQTTQKGQKNSRERMKRIEEGIKELGSQILKEHPVENTQLQNEKLYLYYLQNGRDMYVDQELDINRLSDYDVDHIVPQSFLKDDSIDNKVLTRSDKARGKSDNVPSEEVVKKMKNYWRQLLNAKLITQRKFDNLTKAERGGLSELDKAGFIKRQLVETRQITKHVAQILDSRMNTKYDENDKLIREVKVITLKSKLVSDFRKDFQFYKVREINNYHHAHDAYLNAVVGTALIKKYPKLESEFVYGDYKVYDVRKMIAKSEQEIGKATAKYFFYSNIMNFFKTEITLANGEIRKRPLIETNGETGEIVWDKGRDFATVRKVLSMPQVNIVKKTEVQTGGFSKESILPKRNSDKLIARKKDWDPKKYGGFDSPTVAYSVLVVAKVEKGKSKKLKSVKELLGITIMERSSFEKNPIDFLEAKGYKEVKKDLIIKLPKYSLFELENGRKRMLASAGELQKGNELALPSKYVNFLYLASHYEKLKGSPEDNEQKQLFVEQHKHYLDEIIEQISEFSKRVILADANLDKVLSAYNKHRDKPIREQAENIIHLFTLTNLGAPAAFKYFDTTIDRKRYTSTKEVLDATLIHQSITGLYETRIDLSQLGGDGGGSSPAPGGSGGTLQLDDEYRLYSPLVKPDQNIQFWLEQFPQAWAETAGMGLAKQVPPQVIQLKASATPVSVRQYPLSKEAQEGIRPHVQRLIQQGILVPVQSPWNTPLLPVRKPGTNDYRPVQDLREVNKRVQDIHPTVPNPYNLLCALPPQRSWYTVLDLKDAFFCLRLHPTSQPLFAFEWRDPGTGRTGQLTWTRLPQGFKNSPTIFDEALHRDLANFRIQHPQVTLLQYVDDLLLAGATKQDCLEGTKALLLELSDLGYRASAKKAQICRREVTYLGYSLRDGQRWLTEARKKTVVQIPAPTTAKQVREFLGTAGFCRLWIPGFATLAAPLYPLTKEKGEFSWAPEHQKAFDAIKKALLSAPALALPDVTKPFTLYVDERKGVARGVLTQTLGPWRRPVAYLSKKLDPVASGWPVCLKAIAAVAILVKDADKLTLGQNITVIAPHALENIVRQPPDRWMTNARMTHYQSLLLTERVTFAPPAALNPATLLPEETDEPVTHDCHQLLIEETGVRKDLTDIPLTGEVLTWFTDGSSYVVEGKRMAGAAVVDGTRTIWASSLPEGTSAQKAELMALTQALRLAEGKSINIYTDSRYAFATAHVHGAIYKQRGLLTSAGREIKNKEEILSLLEALHLPKRLAIIHCPGHQKAKDPISRGNQMADRVAKQAAQGVNLLAGKRTADGSEFEKRTADGSEFESPKKKAKVE

SEQ ID NO: 21591 - protein, 2090 aa, synthetic construct
MPAAKRVKLDGGDKKYSIGLDIGTNSVGWAVITDEYKVPSKKFKVLGNTDRHSIKKNLIGALLFDSGETAEATRLKRTARRRYTRRKNRICYLQEIFSNEMAKVDDSFFHRLEESFLVEEDKKHERHPIFGNIVDEVAYHEKYPTIYHLRKKLVDSTDKADLRLIYLALAHMIKFRGHFLIEGDLNPDNSDVDKLFIQLVQTYNQLFEENPINASGVDAKAILSARLSKSRRLENLIAQLPGEKKNGLFGNLIALSLGLTPNFKSNFDLAEDAKLQLSKDTYDDDLDNLLAQIGDQYADLFLAAKNLSDAILLSDILRVNTEITKAPLSASMIKRYDEHHQDLTLLKALVRQQLPEKYKEIFFDQSKNGYAGYIDGGASQEEFYKFIKPILEKMDGTEELLVKLNREDLLRKQRTFDNGSIPHQIHLGELHAILRRQEDFYPFLKDNREKIEKILTFRIPYYVGPLARGNSRFAWMTRKSEETITPWNFEEVVDKGASAQSFIERMTNFDKNLPNEKVLPKHSLLYEYFTVYNELTKVKYVTEGMRKPAFLSGEQKKAIVDLLFKTNRKVTVKQLKEDYFKKIECFDSVEISGVEDRFNASLGTYHDLLKIIKDKDFLDNEENEDILEDIVLTLTLFEDREMIEERLKTYAHLFDDKVMKQLKRRRYTGWGRLSRKLINGIRDKQSGKTILDFLKSDGFANRNFMQLIHDDSLTFKEDIQKAQVSGQGDSLHEHIANLAGSPAIKKGILQTVKVVDELVKVMGRHKPENIVIEMARENQTTQKGQKNSRERMKRIEEGIKELGSQILKEHPVENTQLQNEKLYLYYLQNGRDMYVDQELDINRLSDYDVDHIVPQSFLKDDSIDNKVLTRSDKARGKSDNVPSEEVVKKMKNYWRQLLNAKLITQRKFDNLTKAERGGLSELDKAGFIKRQLVETRQITKHVAQILDSRMNTKYDENDKLIREVKVITLKSKLVSDFRKDFQFYKVREINNYHHAHDAYLNAVVGTALIKKYPKLESEFVYGDYKVYDVRKMIAKSEQEIGKATAKYFFYSNIMNFFKTEITLANGEIRKRPLIETNGETGEIVWDKGRDFATVRKVLSMPQVNIVKKTEVQTGGFSKESILPKRNSDKLIARKKDWDPKKYGGFDSPTVAYSVLVVAKVEKGKSKKLKSVKELLGITIMERSSFEKNPIDFLEAKGYKEVKKDLIIKLPKYSLFELENGRKRMLASAGELQKGNELALPSKYVNFLYLASHYEKLKGSPEDNEQKQLFVEQHKHYLDEIIEQISEFSKRVILADANLDKVLSAYNKHRDKPIREQAENIIHLFTLTNLGAPAAFKYFDTTIDRKRYTSTKEVLDATLIHQSITGLYETRIDLSQLGGDGGEAAAKGSSGGGGGTLQLDDEYRLYSPLVKPDQNIQFWLEQFPQAWAETAGMGLAKQVPPQVIQLKASATPVSVRQYPLSKEAQEGIRPHVQRLIQQGILVPVQSPWNTPLLPVRKPGTNDYRPVQDLREVNKRVQDIHPTVPNPYNLLCALPPQRSWYTVLDLKDAFFCLRLHPTSQPLFAFEWRDPGTGRTGQLTWTRLPQGFKNSPTIFDEALHRDLANFRIQHPQVTLLQYVDDLLLAGATKQDCLEGTKALLLELSDLGYRASAKKAQICRREVTYLGYSLRDGQRWLTEARKKTVVQIPAPTTAKQVREFLGTAGFCRLWIPGFATLAAPLYPLTKEKGEFSWAPEHQKAFDAIKKALLSAPALALPDVTKPFTLYVDERKGVARGVLTQTLGPWRRPVAYLSKKLDPVASGWPVCLKAIAAVAILVKDADKLTLGQNITVIAPHALENIVRQPPDRWMTNARMTHYQSLLLTERVTFAPPAALNPATLLPEETDEPVTHDCHQLLIEETGVRKDLTDIPLTGEVLTWFTDGSSYVVEGKRMAGAAVVDGTRTIWASSLPEGTSAQKAELMALTQALRLAEGKSINIYTDSRYAFATAHVHGAIYKQRGLLTSAGREIKNKEEILSLLEALHLPKRLAIIHCPGHQKAKDPISRGNQMADRVAKQAAQGVNLLAGKRTADGSEFEKRTADGSEFESPKKKAKVE

SEQ ID NO: 21592 - protein, 2087 aa, synthetic construct
MPAAKRVKLDGGDKKYSIGLDIGTNSVGWAVITDEYKVPSKKFKVLGNTDRHSIKKNLIGALLFDSGETAEATRLKRTARRRYTRRKNRICYLQEIFSNEMAKVDDSFFHRLEESFLVEEDKKHERHPIFGNIVDEVAYHEKYPTIYHLRKKLVDSTDKADLRLIYLALAHMIKFRGHFLIEGDLNPDNSDVDKLFIQLVQTYNQLFEENPINASGVDAKAILSARLSKSRRLENLIAQLPGEKKNGLFGNLIALSLGLTPNFKSNFDLAEDAKLQLSKDTYDDDLDNLLAQIGDQYADLFLAAKNLSDAILLSDILRVNTEITKAPLSASMIKRYDEHHQDLTLLKALVRQQLPEKYKEIFFDQSKNGYAGYIDGGASQEEFYKFIKPILEKMDGTEELLVKLNREDLLRKQRTFDNGSIPHQIHLGELHAILRRQEDFYPFLKDNREKIEKILTFRIPYYVGPLARGNSRFAWMTRKSEETITPWNFEEVVDKGASAQSFIERMTNFDKNLPNEKVLPKHSLLYEYFTVYNELTKVKYVTEGMRKPAFLSGEQKKAIVDLLFKTNRKVTVKQLKEDYFKKIECFDSVEISGVEDRFNASLGTYHDLLKIIKDKDFLDNEENEDILEDIVLTLTLFEDREMIEERLKTYAHLFDDKVMKQLKRRRYTGWGRLSRKLINGIRDKQSGKTILDFLKSDGFANRNFMQLIHDDSLTFKEDIQKAQVSGQGDSLHEHIANLAGSPAIKKGILQTVKVVDELVKVMGRHKPENIVIEMARENQTTQKGQKNSRERMKRIEEGIKELGSQILKEHPVENTQLQNEKLYLYYLQNGRDMYVDQELDINRLSDYDVDHIVPQSFLKDDSIDNKVLTRSDKARGKSDNVPSEEVVKKMKNYWRQLLNAKLITQRKFDNLTKAERGGLSELDKAGFIKRQLVETRQITKHVAQILDSRMNTKYDENDKLIREVKVITLKSKLVSDFRKDFQFYKVREINNYHHAHDAYLNAVVGTALIKKYPKLESEFVYGDYKVYDVRKMIAKSEQEIGKATAKYFFYSNIMNFFKTEITLANGEIRKRPLIETNGETGEIVWDKGRDFATVRKVLSMPQVNIVKKTEVQTGGFSKESILPKRNSDKLIARKKDWDPKKYGGFDSPTVAYSVLVVAKVEKGKSKKLKSVKELLGITIMERSSFEKNPIDFLEAKGYKEVKKDLIIKLPKYSLFELENGRKRMLASAGELQKGNELALPSKYVNFLYLASHYEKLKGSPEDNEQKQLFVEQHKHYLDEIIEQISEFSKRVILADANLDKVLSAYNKHRDKPIREQAENIIHLFTLTNLGAPAAFKYFDTTIDRKRYTSTKEVLDATLIHQSITGLYETRIDLSQLGGDGGEAAAKPAPGGTLQLDDEYRLYSPLVKPDQNIQFWLEQFPQAWAETAGMGLAKQVPPQVIQLKASATPVSVRQYPLSKEAQEGIRPHVQRLIQQGILVPVQSPWNTPLLPVRKPGTNDYRPVQDLREVNKRVQDIHPTVPNPYNLLCALPPQRSWYTVLDLKDAFFCLRLHPTSQPLFAFEWRDPGTGRTGQLTWTRLPQGFKNSPTIFDEALHRDLANFRIQHPQVTLLQYVDDLLLAGATKQDCLEGTKALLLELSDLGYRASAKKAQICRREVTYLGYSLRDGQRWLTEARKKTVVQIPAPTTAKQVREFLGTAGFCRLWIPGFATLAAPLYPLTKEKGEFSWAPEHQKAFDAIKKALLSAPALALPDVTKPFTLYVDERKGVARGVLTQTLGPWRRPVAYLSKKLDPVASGWPVCLKAIAAVAILVKDADKLTLGQNITVIAPHALENIVRQPPDRWMTNARMTHYQSLLLTERVTFAPPAALNPATLLPEETDEPVTHDCHQLLIEETGVRKDLTDIPLTGEVLTWFTDGSSYVVEGKRMAGAAVVDGTRTIWASSLPEGTSAQKAELMALTQALRLAEGKSINIYTDSRYAFATAHVHGAIYKQRGLLTSAGREIKNKEEILSLLEALHLPKRLAIIHCPGHQKAKDPISRGNQMADRVAKQAAQGVNLLAGKRTADGSEFEKRTADGSEFESPKKKAKVE

SEQ ID NO: 21593 - protein, 2094 aa, synthetic construct
MPAAKRVKLDGGDKKYSIGLDIGTNSVGWAVITDEYKVPSKKFKVLGNTDRHSIKKNLIGALLFDSGETAEATRLKRTARRRYTRRKNRICYLQEIFSNEMAKVDDSFFHRLEESFLVEEDKKHERHPIFGNIVDEVAYHEKYPTIYHLRKKLVDSTDKADLRLIYLALAHMIKFRGHFLIEGDLNPDNSDVDKLFIQLVQTYNQLFEENPINASGVDAKAILSARLSKSRRLENLIAQLPGEKKNGLFGNLIALSLGLTPNFKSNFDLAEDAKLQLSKDTYDDDLDNLLAQIGDQYADLFLAAKNLSDAILLSDILRVNTEITKAPLSASMIKRYDEHHQDLTLLKALVRQQLPEKYKEIFFDQSKNGYAGYIDGGASQEEFYKFIKPILEKMDGTEELLVKLNREDLLRKQRTFDNGSIPHQIHLGELHAILRRQEDFYPFLKDNREKIEKILTFRIPYYVGPLARGNSRFAWMTRKSEETITPWNFEEVVDKGASAQSFIERMTNFDKNLPNEKVLPKHSLLYEYFTVYNELTKVKYVTEGMRKPAFLSGEQKKAIVDLLFKTNRKVTVKQLKEDYFKKIECFDSVEISGVEDRFNASLGTYHDLLKIIKDKDFLDNEENEDILEDIVLTLTLFEDREMIEERLKTYAHLFDDKVMKQLKRRRYTGWGRLSRKLINGIRDKQSGKTILDFLKSDGFANRNFMQLIHDDSLTFKEDIQKAQVSGQGDSLHEHIANLAGSPAIKKGILQTVKVVDELVKVMGRHKPENIVIEMARENQTTQKGQKNSRERMKRIEEGIKELGSQILKEHPVENTQLQNEKLYLYYLQNGRDMYVDQELDINRLSDYDVDHIVPQSFLKDDSIDNKVLTRSDKARGKSDNVPSEEVVKKMKNYWRQLLNAKLITQRKFDNLTKAERGGLSELDKAGFIKRQLVETRQITKHVAQILDSRMNTKYDENDKLIREVKVITLKSKLVSDFRKDFQFYKVREINNYHHAHDAYLNAVVGTALIKKYPKLESEFVYGDYKVYDVRKMIAKSEQEIGKATAKYFFYSNIMNFFKTEITLANGEIRKRPLIETNGETGEIVWDKGRDFATVRKVLSMPQVNIVKKTEVQTGGFSKESILPKRNSDKLIARKKDWDPKKYGGFDSPTVAYSVLVVAKVEKGKSKKLKSVKELLGITIMERSSFEKNPIDFLEAKGYKEVKKDLIIKLPKYSLFELENGRKRMLASAGELQKGNELALPSKYVNFLYLASHYEKLKGSPEDNEQKQLFVEQHKHYLDEIIEQISEFSKRVILADANLDKVLSAYNKHRDKPIREQAENIIHLFTLTNLGAPAAFKYFDTTIDRKRYTSTKEVLDATLIHQSITGLYETRIDLSQLGGDGGEAAAKEAAAKEAAAKGGTLQLDDEYRLYSPLVKPDQNIQFWLEQFPQAWAETAGMGLAKQVPPQVIQLKASATPVSVRQYPLSKEAQEGIRPHVQRLIQQGILVPVQSPWNTPLLPVRKPGTNDYRPVQDLREVNKRVQDIHPTVPNPYNLLCALPPQRSWYTVLDLKDAFFCLRLHPTSQPLFAFEWRDPGTGRTGQLTWTRLPQGFKNSPTIFNEALHRDLANFRIQHPQVTLLQYVDDLLLAGATKQDCLEGTKALLLELSDLGYRASAKKAQICRREVTYLGYSLRDGQRWLTEARKKTVVQIPAPTTAKQVREFLGTAGFCRLWIPGFATLAAPLYPLTKPKGEFSWAPEHQKAFDAIKKALLSAPALALPDVTKPFTLYVDERKGVARGVLTQTLGPWRRPVAYLSKKLDPVASGWPVCLKAIAAVAILVKDADKLTLGQNITVIAPHALENIVRQPPDRWMTNARMTHYQSLLLTERVTFAPPAALNPATLLPEETDEPVTHDCHQLLIEETGVRKDLTDIPLTGEVLTWFTDGSSYVVEGKRMAGAAVVDGTRTIWASSLPEGTSAQKAELMALTQALRLAEGKSINIYTDSRYAFATAHVHGAIYKQRGWLTSAGREIKNKEEILSLLEALHLPKRLAIIHCPGHQKAKDPISRGNQMADRVAKQAAQGVNLLAGKRTADGSEFEKRTADGSEFESPKKKAKVE

SEQ ID NO: 21594 - protein, 2090 aa, synthetic construct
MPAAKRVKLDGGDKKYSIGLDIGTNSVGWAVITDEYKVPSKKFKVLGNTDRHSIKKNLIGALLFDSGETAEATRLKRTARRRYTRRKNRICYLQEIFSNEMAKVDDSFFHRLEESFLVEEDKKHERHPIFGNIVDEVAYHEKYPTIYHLRKKLVDSTDKADLRLIYLALAHMIKFRGHFLIEGDLNPDNSDVDKLFIQLVQTYNQLFEENPINASGVDAKAILSARLSKSRRLENLIAQLPGEKKNGLFGNLIALSLGLTPNFKSNFDLAEDAKLQLSKDTYDDDLDNLLAQIGDQYADLFLAAKNLSDAILLSDILRVNTEITKAPLSASMIKRYDEHHQDLTLLKALVRQQLPEKYKEIFFDQSKNGYAGYIDGGASQEEFYKFIKPILEKMDGTEELLVKLNREDLLRKQRTFDNGSIPHQIHLGELHAILRRQEDFYPFLKDNREKIEKILTFRIPYYVGPLARGNSRFAWMTRKSEETITPWNFEEVVDKGASAQSFIERMTNFDKNLPNEKVLPKHSLLYEYFTVYNELTKVKYVTEGMRKPAFLSGEQKKAIVDLLFKTNRKVTVKQLKEDYFKKIECFDSVEISGVEDRFNASLGTYHDLLKIIKDKDFLDNEENEDILEDIVLTLTLFEDREMIEERLKTYAHLFDDKVMKQLKRRRYTGWGRLSRKLINGIRDKQSGKTILDFLKSDGFANRNFMQLIHDDSLTFKEDIQKAQVSGQGDSLHEHIANLAGSPAIKKGILQTVKVVDELVKVMGRHKPENIVIEMARENQTTQKGQKNSRERMKRIEEGIKELGSQILKEHPVENTQLQNEKLYLYYLQNGRDMYVDQELDINRLSDYDVDHIVPQSFLKDDSIDNKVLTRSDKARGKSDNVPSEEVVKKMKNYWRQLLNAKLITQRKFDNLTKAERGGLSELDKAGFIKRQLVETRQITKHVAQILDSRMNTKYDENDKLIREVKVITLKSKLVSDFRKDFQFYKVREINNYHHAHDAYLNAVVGTALIKKYPKLESEFVYGDYKVYDVRKMIAKSEQEIGKATAKYFFYSNIMNFFKTEITLANGEIRKRPLIETNGETGEIVWDKGRDFATVRKVLSMPQVNIVKKTEVQTGGFSKESILPKRNSDKLIARKKDWDPKKYGGFDSPTVAYSVLVVAKVEKGKSKKLKSVKELLGITIMERSSFEKNPIDFLEAKGYKEVKKDLIIKLPKYSLFELENGRKRMLASAGELQKGNELALPSKYVNFLYLASHYEKLKGSPEDNEQKQLFVEQHKHYLDEIIEQISEFSKRVILADANLDKVLSAYNKHRDKPIREQAENIIHLFTLTNLGAPAAFKYFDTTIDRKRYTSTKEVLDATLIHQSITGLYETRIDLSQLGGDGGEAAAKGGSGGGGGTLQLDDEYRLYSPLVKPDQNIQFWLEQFPQAWAETAGMGLAKQVPPQVIQLKASATPVSVRQYPLSKEAQEGIRPHVQRLIQQGILVPVQSPWNTPLLPVRKPGTNDYRPVQDLREVNKRVQDIHPTVPNPYNLLCALPPQRSWYTVLDLKDAFFCLRLHPTSQPLFAFEWRDPGTGRTGQLTWTRLPQGFKNSPTIFNEALHRDLANFRIQHPQVTLLQYVDDLLLAGATKQDCLEGTKALLLELSDLGYRASAKKAQICRREVTYLGYSLRDGQRWLTEARKKTVVQIPAPTTAKQVREFLGTAGFCRLWIPGFATLAAPLYPLTKPKGEFSWAPEHQKAFDAIKKALLSAPALALPDVTKPFTLYVDERKGVARGVLTQTLGPWRRPVAYLSKKLDPVASGWPVCLKAIAAVAILVKDADKLTLGQNITVIAPHALENIVRQPPDRWMTNARMTHYQSLLLTERVTFAPPAALNPATLLPEETDEPVTHDCHQLLIEETGVRKDLTDIPLTGEVLTWFTDGSSYVVEGKRMAGAAVVDGTRTIWASSLPEGTSAQKAELMALTQALRLAEGKSINIYTDSRYAFATAHVHGAIYKQRGWLTSAGREIKNKEEILSLLEALHLPKRLAIIHCPGHQKAKDPISRGNQMADRVAKQAAQGVNLLAGKRTADGSEFEKRTADGSEFESPKKKAKVE

SEQ ID NO: 21595 - protein, 2125 aa, synthetic construct; identical to SEQ ID NO: 21451

SEQ ID NO: 21596 - protein, 2090 aa, synthetic construct
MPAAKRVKLDGGDKKYSIGLDIGTNSVGWAVITDEYKVPSKKFKVLGNTDRHSIKKNLIGALLFDSGETAEATRLKRTARRRYTRRKNRICYLQEIFSNEMAKVDDSFFHRLEESFLVEEDKKHERHPIFGNIVDEVAYHEKYPTIYHLRKKLVDSTDKADLRLIYLALAHMIKFRGHFLIEGDLNPDNSDVDKLFIQLVQTYNQLFEENPINASGVDAKAILSARLSKSRRLENLIAQLPGEKKNGLFGNLIALSLGLTPNFKSNFDLAEDAKLQLSKDTYDDDLDNLLAQIGDQYADLFLAAKNLSDAILLSDILRVNTEITKAPLSASMIKRYDEHHQDLTLLKALVRQQLPEKYKEIFFDQSKNGYAGYIDGGASQEEFYKFIKPILEKMDGTEELLVKLNREDLLRKQRTFDNGSIPHQIHLGELHAILRRQEDFYPFLKDNREKIEKILTFRIPYYVGPLARGNSRFAWMTRKSEETITPWNFEEVVDKGASAQSFIERMTNFDKNLPNEKVLPKHSLLYEYFTVYNELTKVKYVTEGMRKPAFLSGEQKKAIVDLLFKTNRKVTVKQLKEDYFKKIECFDSVEISGVEDRFNASLGTYHDLLKIIKDKDFLDNEENEDILEDIVLTLTLFEDREMIEERLKTYAHLFDDKVMKQLKRRRYTGWGRLSRKLINGIRDKQSGKTILDFLKSDGFANRNFMQLIHDDSLTFKEDIQKAQVSGQGDSLHEHIANLAGSPAIKKGILQTVKVVDELVKVMGRHKPENIVIEMARENQTTQKGQKNSRERMKRIEEGIKELGSQILKEHPVENTQLQNEKLYLYYLQNGRDMYVDQELDINRLSDYDVDHIVPQSFLKDDSIDNKVLTRSDKARGKSDNVPSEEVVKKMKNYWRQLLNAKLITQRKFDNLTKAERGGLSELDKAGFIKRQLVETRQITKHVAQILDSRMNTKYDENDKLIREVKVITLKSKLVSDFRKDFQFYKVREINNYHHAHDAYLNAVVGTALIKKYPKLESEFVYGDYKVYDVRKMIAKSEQEIGKATAKYFFYSNIMNFFKTEITLANGEIRKRPLIETNGETGEIVWDKGRDFATVRKVLSMPQVNIVKKTEVQTGGFSKESILPKRNSDKLIARKKDWDPKKYGGFDSPTVAYSVLVVAKVEKGKSKKLKSVKELLGITIMERSSFEKNPIDFLEAKGYKEVKKDLIIKLPKYSLFELENGRKRMLASAGELQKGNELALPSKYVNFLYLASHYEKLKGSPEDNEQKQLFVEQHKHYLDEIIEQISEFSKRVILADANLDKVLSAYNKHRDKPIREQAENIIHLFTLTNLGAPAAFKYFDTTIDRKRYTSTKEVLDATLIHQSITGLYETRIDLSQLGGDGGGGGEAAAKGSSGGTLQLDDEYRLYSPLVKPDQNIQFWLEQFPQAWAETAGMGLAKQVPPQVIQLKASATPVSVRQYPLSKEAQEGIRPHVQRLIQQGILVPVQSPWNTPLLPVRKPGTNDYRPVQDLREVNKRVQDIHPTVPNPYNLLCALPPQRSWYTVLDLKDAFFCLRLHPTSQPLFAFEWRDPGTGRTGQLTWTRLPQGFKNSPTIFNEALHRDLANFRIQHPQVTLLQYVDDLLLAGATKQDCLEGTKALLLELSDLGYRASAKKAQICRREVTYLGYSLRDGQRWLTEARKKTVVQIPAPTTAKQVREFLGTAGFCRLWIPGFATLAAPLYPLTKPKGEFSWAPEHQKAFDAIKKALLSAPALALPDVTKPFTLYVDERKGVARGVLTQTLGPWRRPVAYLSKKLDPVASGWPVCLKAIAAVAILVKDADKLTLGQNITVIAPHALENIVRQPPDRWMTNARMTHYQSLLLTERVTFAPPAALNPATLLPEETDEPVTHDCHQLLIEETGVRKDLTDIPLTGEVLTWFTDGSSYVVEGKRMAGAAVVDGTRTIWASSLPEGTSAQKAELMALTQALRLAEGKSINIYTDSRYAFATAHVHGAIYKQRGWLTSAGREIKNKEEILSLLEALHLPKRLAIIHCPGHQKAKDPISRGNQMADRVAKQAAQGVNLLAGKRTADGSEFEKRTADGSEFESPKKKAKVE

SEQ ID NO: 21597 - protein, 2090 aa, synthetic construct; identical to SEQ ID NO: 21459

SEQ ID NO: 21598 - protein, 2112 aa, synthetic construct; identical to SEQ ID NO: 21435

SEQ ID NO: 21599 - protein, 2090 aa, synthetic construct
MPAAKRVKLDGGDKKYSIGLDIGTNSVGWAVITDEYKVPSKKFKVLGNTDRHSIKKNLIGALLFDSGETAEATRLKRTARRRYTRRKNRICYLQEIFSNEMAKVDDSFFHRLEESFLVEEDKKHERHPIFGNIVDEVAYHEKYPTIYHLRKKLVDSTDKADLRLIYLALAHMIKFRGHFLIEGDLNPDNSDVDKLFIQLVQTYNQLFEENPINASGVDAKAILSARLSKSRRLENLIAQLPGEKKNGLFGNLIALSLGLTPNFKSNFDLAEDAKLQLSKDTYDDDLDNLLAQIGDQYADLFLAAKNLSDAILLSDILRVNTEITKAPLSASMIKRYDEHHQDLTLLKALVRQQLPEKYKEIFFDQSKNGYAGYIDGGASQEEFYKFIKPILEKMDGTEELLVKLNREDLLRKQRTFDNGSIPHQIHLGELHAILRRQEDFYPFLKDNREKIEKILTFRIPYYVGPLARGNSRFAWMTRKSEETITPWNFEEVVDKGASAQSFIERMTNFDKNLPNEKVLPKHSLLYEYFTVYNELTKVKYVTEGMRKPAFLSGEQKKAIVDLLFKTNRKVTVKQLKEDYFKKIECFDSVEISGVEDRFNASLGTYHDLLKIIKDKDFLDNEENEDILEDIVLTLTLFEDREMIEERLKTYAHLFDDKVMKQLKRRRYTGWGRLSRKLINGIRDKQSGKTILDFLKSDGFANRNFMQLIHDDSLTFKEDIQKAQVSGQGDSLHEHIANLAGSPAIKKGILQTVKVVDELVKVMGRHKPENIVIEMARENQTTQKGQKNSRERMKRIEEGIKELGSQILKEHPVENTQLQNEKLYLYYLQNGRDMYVDQELDINRLSDYDVDHIVPQSFLKDDSIDNKVLTRSDKARGKSDNVPSEEVVKKMKNYWRQLLNAKLITQRKFDNLTKAERGGLSELDKAGFIKRQLVETRQITKHVAQILDSRMNTKYDENDKLIREVKVITLKSKLVSDFRKDFQFYKVREINNYHHAHDAYLNAVVGTALIKKYPKLESEFVYGDYKVYDVRKMIAKSEQEIGKATAKYFFYSNIMNFFKTEITLANGEIRKRPLIETNGETGEIVWDKGRDFATVRKVLSMPQVNIVKKTEVQTGGFSKESILPKRNSDKLIARKKDWDPKKYGGFDSPTVAYSVLVVAKVEKGKSKKLKSVKELLGITIMERSSFEKNPIDFLEAKGYKEVKKDLIIKLPKYSLFELENGRKRMLASAGELQKGNELALPSKYVNFLYLASHYEKLKGSPEDNEQKQLFVEQHKHYLDEIIEQISEFSKRVILADANLDKVLSAYNKHRDKPIREQAENIIHLFTLTNLGAPAAFKYFDTTIDRKRYTSTKEVLDATLIHQSITGLYETRIDLSQLGGDGGEAAAKPAPGSSGGTLQLDDEYRLYSPLVKPDQNIQFWLEQFPQAWAETAGMGLAKQVPPQVIQLKASATPVSVRQYPLSKEAQEGIRPHVQRLIQQGILVPVQSPWNTPLLPVRKPGTNDYRPVQDLREVNKRVQDIHPTVPNPYNLLCALPPQRSWYTVLDLKDAFFCLRLHPTSQPLFAFEWRDPGTGRTGQLTWTRLPQGFKNSPTIFNEALHRDLANFRIQHPQVTLLQYVDDLLLAGATKQDCLEGTKALLLELSDLGYRASAKKAQICRREVTYLGYSLRDGQRWLTEARKKTVVQIPAPTTAKQVREFLGTAGFCRLWIPGFATLAAPLYPLTKPKGEFSWAPEHQKAFDAIKKALLSAPALALPDVTKPFTLYVDERKGVARGVLTQTLGPWRRPVAYLSKKLDPVASGWPVCLKAIAAVAILVKDADKLTLGQNITVIAPHALENIVRQPPDRWMTNARMTHYQSLLLTERVTFAPPAALNPATLLPEETDEPVTHDCHQLLIEETGVRKDLTDIPLTGEVLTWFTDGSSYVVEGKRMAGAAVVDGTRTIWASSLPEGTSAQKAELMALTQALRLAEGKSINIYTDSRYAFATAHVHGAIYKQRGWLTSAGREIKNKEEILSLLEALHLPKRLAIIHCPGHQKAKDPISRGNQMADRVAKQAAQGVNLLAGKRTADGSEFEKRTADGSEFESPKKKAKVE

SEQ ID NO: 21600 - protein, 2090 aa, synthetic construct; identical to SEQ ID NO: 21423

SEQ ID NO: 21601 - protein, 2087 aa, synthetic construct; identical to SEQ ID NO: 21422

SEQ ID NO: 21602 - protein, 2088 aa, synthetic construct
MPAAKRVKLDGGDKKYSIGLDIGTNSVGWAVITDEYKVPSKKFKVLGNTDRHSIKKNLIGALLFDSGETAEATRLKRTARRRYTRRKNRICYLQEIFSNEMAKVDDSFFHRLEESFLVEEDKKHERHPIFGNIVDEVAYHEKYPTIYHLRKKLVDSTDKADLRLIYLALAHMIKFRGHFLIEGDLNPDNSDVDKLFIQLVQTYNQLFEENPINASGVDAKAILSARLSKSRRLENLIAQLPGEKKNGLFGNLIALSLGLTPNFKSNFDLAEDAKLQLSKDTYDDDLDNLLAQIGDQYADLFLAAKNLSDAILLSDILRVNTEITKAPLSASMIKRYDEHHQDLTLLKALVRQQLPEKYKEIFFDQSKNGYAGYIDGGASQEEFYKFIKPILEKMDGTEELLVKLNREDLLRKQRTFDNGSIPHQIHLGELHAILRRQEDFYPFLKDNREKIEKILTFRIPYYVGPLARGNSRFAWMTRKSEETITPWNFEEVVDKGASAQSFIERMTNFDKNLPNEKVLPKHSLLYEYFTVYNELTKVKYVTEGMRKPAFLSGEQKKAIVDLLFKTNRKVTVKQLKEDYFKKIECFDSVEISGVEDRFNASLGTYHDLLKIIKDKDFLDNEENEDILEDIVLTLTLFEDREMIEERLKTYAHLFDDKVMKQLKRRRYTGWGRLSRKLINGIRDKQSGKTILDFLKSDGFANRNFMQLIHDDSLTFKEDIQKAQVSGQGDSLHEHIANLAGSPAIKKGILQTVKVVDELVKVMGRHKPENIVIEMARENQTTQKGQKNSRERMKRIEEGIKELGSQILKEHPVENTQLQNEKLYLYYLQNGRDMYVDQELDINRLSDYDVDHIVPQSFLKDDSIDNKVLTRSDKARGKSDNVPSEEVVKKMKNYWRQLLNAKLITQRKFDNLTKAERGGLSELDKAGFIKRQLVETRQITKHVAQILDSRMNTKYDENDKLIREVKVITLKSKLVSDFRKDFQFYKVREINNYHHAHDAYLNAVVGTALIKKYPKLESEFVYGDYKVYDVRKMIAKSEQEIGKATAKYFFYSNIMNFFKTEITLANGEIRKRPLIETNGETGEIVWDKGRDFATVRKVLSMPQVNIVKKTEVQTGGFSKESILPKRNSDKLIARKKDWDPKKYGGFDSPTVAYSVLVVAKVEKGKSKKLKSVKELLGITIMERSSFEKNPIDFLEAKGYKEVKKDLIIKLPKYSLFELENGRKRMLASAGELQKGNELALPSKYVNFLYLASHYEKLKGSPEDNEQKQLFVEQHKHYLDEIIEQISEFSKRVILADANLDKVLSAYNKHRDKPIREQAENIIHLFTLTNLGAPAAFKYFDTTIDRKRYTSTKEVLDATLIHQSITGLYETRIDLSQLGGDGGGGGGSSPAPGGTLQLDDEYRLYSPLVKPDQNIQFWLEQFPQAWAETAGMGLAKQVPPQVIQLKASATPVSVRQYPLSKEAQEGIRPHVQRLIQQGILVPVQSPWNTPLLPVRKPGTNDYRPVQDLREVNKRVQDIHPTVPNPYNLLCALPPQRSWYTVLDLKDAFFCLRLHPTSQPLFAFEWRDPGTGRTGQLTWTRLPQGFKNSPTIFNEALHRDLANFRIQHPQVTLLQYVDDLLLAGATKQDCLEGTKALLLELSDLGYRASAKKAQICRREVTYLGYSLRDGQRWLTEARKKTVVQIPAPTTAKQVREFLGTAGFCRLWIPGFATLAAPLYPLTKPKGEFSWAPEHQKAFDAIKKALLSAPALALPDVTKPFTLYVDERKGVARGVLTQTLGPWRRPVAYLSKKLDPVASGWPVCLKAIAAVAILVKDADKLTLGQNITVIAPHALENIVRQPPDRWMTNARMTHYQSLLLTERVTFAPPAALNPATLLPEETDEPVTHDCHQLLIEETGVRKDLTDIPLTGEVLTWFTDGSSYVVEGKRMAGAAVVDGTRTIWASSLPEGTSAQKAELMALTQALRLAEGKSINIYTDSRYAFATAHVHGAIYKQRGWLTSAGREIKNKEEILSLLEALHLPKRLAIIHCPGHQKAKDPISRGNQMADRVAKQAAQGVNLLAGKRTADGSEFEKRTADGSEFESPKKKAKVE

SEQ ID NO: 21603 - protein, 2084 aa, synthetic construct; identical to SEQ ID NO: 21446

SEQ ID NO: 21604 - protein, 2092 aa, synthetic construct; identical to SEQ ID NO: 21452

SEQ ID NO: 21605 - protein, 2090 aa, synthetic construct
MPAAKRVKLDGGDKKYSIGLDIGTNSVGWAVITDEYKVPSKKFKVLGNTDRHSIKKNLIGALLFDSGETAEATRLKRTARRRYTRRKNRICYLQEIFSNEMAKVDDSFFHRLEESFLVEEDKKHERHPIFGNIVDEVAYHEKYPTIYHLRKKLVDSTDKADLRLIYLALAHMIKFRGHFLIEGDLNPDNSDVDKLFIQLVQTYNQLFEENPINASGVDAKAILSARLSKSRRLENLIAQLPGEKKNGLFGNLIALSLGLTPNFKSNFDLAEDAKLQLSKDTYDDDLDNLLAQIGDQYADLFLAAKNLSDAILLSDILRVNTEITKAPLSASMIKRYDEHHQDLTLLKALVRQQLPEKYKEIFFDQSKNGYAGYIDGGASQEEFYKFIKPILEKMDGTEELLVKLNREDLLRKQRTFDNGSIPHQIHLGELHAILRRQEDFYPFLKDNREKIEKILTFRIPYYVGPLARGNSRFAWMTRKSEETITPWNFEEVVDKGASAQSFIERMTNFDKNLPNEKVLPKHSLLYEYFTVYNELTKVKYVTEGMRKPAFLSGEQKKAIVDLLFKTNRKVTVKQLKEDYFKKIECFDSVEISGVEDRFNASLGTYHDLLKIIKDKDFLDNEENEDILEDIVLTLTLFEDREMIEERLKTYAHLFDDKVMKQLKRRRYTGWGRLSRKLINGIRDKQSGKTILDFLKSDGFANRNFMQLIHDDSLTFKEDIQKAQVSGQGDSLHEHIANLAGSPAIKKGILQTVKVVDELVKVMGRHKPENIVIEMARENQTTQKGQKNSRERMKRIEEGIKELGSQILKEHPVENTQLQNEKLYLYYLQNGRDMYVDQELDINRLSDYDVDHIVPQSFLKDDSIDNKVLTRSDKARGKSDNVPSEEVVKKMKNYWRQLLNAKLITQRKFDNLTKAERGGLSELDKAGFIKRQLVETRQITKHVAQILDSRMNTKYDENDKLIREVKVITLKSKLVSDFRKDFQFYKVREINNYHHAHDAYLNAVVGTALIKKYPKLESEFVYGDYKVYDVRKMIAKSEQEIGKATAKYFFYSNIMNFFKTEITLANGEIRKRPLIETNGETGEIVWDKGRDFATVRKVLSMPQVNIVKKTEVQTGGFSKESILPKRNSDKLIARKKDWDPKKYGGFDSPTVAYSVLVVAKVEKGKSKKLKSVKELLGITIMERSSFEKNPIDFLEAKGYKEVKKDLIIKLPKYSLFELENGRKRMLASAGELQKGNELALPSKYVNFLYLASHYEKLKGSPEDNEQKQLFVEQHKHYLDEIIEQISEFSKRVILADANLDKVLSAYNKHRDKPIREQAENIIHLFTLTNLGAPAAFKYFDTTIDRKRYTSTKEVLDATLIHQSITGLYETRIDLSQLGGDGGGSSPAPEAAAKGGTLQLDDEYRLYSPLVKPDQNIQFWLEQFPQAWAETAGMGLAKQVPPQVIQLKASATPVSVRQYPLSKEAQEGIRPHVQRLIQQGILVPVQSPWNTPLLPVRKPGTNDYRPVQDLREVNKRVQDIHPTVPNPYNLLCALPPQRSWYTVLDLKDAFFCLRLHPTSQPLFAFEWRDPGTGRTGQLTWTRLPQGFKNSPTIFNEALHRDLANFRIQHPQVTLLQYVDDLLLAGATKQDCLEGTKALLLELSDLGYRASAKKAQICRREVTYLGYSLRDGQRWLTEARKKTVVQIPAPTTAKQVREFLGTAGFCRLWIPGFATLAAPLYPLTKPKGEFSWAPEHQKAFDAIKKALLSAPALALPDVTKPFTLYVDERKGVARGVLTQTLGPWRRPVAYLSKKLDPVASGWPVCLKAIAAVAILVKDADKLTLGQNITVIAPHALENIVRQPPDRWMTNARMTHYQSLLLTERVTFAPPAALNPATLLPEETDEPVTHDCHQLLIEETGVRKDLTDIPLTGEVLTWFTDGSSYVVEGKRMAGAAVVDGTRTIWASSLPEGTSAQKAELMALTQALRLAEGKSINIYTDSRYAFATAHVHGAIYKQRGWLTSAGREIKNKEEILSLLEALHLPKRLAIIHCPGHQKAKDPISRGNQMADRVAKQAAQGVNLLAGKRTADGSEFEKRTADGSEFESPKKKAKVE

SEQ ID NO: 21606 - protein, 2090 aa, synthetic construct
MPAAKRVKLDGGDKKYSIGLDIGTNSVGWAVITDEYKVPSKKFKVLGNTDRHSIKKNLIGALLFDSGETAEATRLKRTARRRYTRRKNRICYLQEIFSNEMAKVDDSFFHRLEESFLVEEDKKHERHPIFGNIVDEVAYHEKYPTIYHLRKKLVDSTDKADLRLIYLALAHMIKFRGHFLIEGDLNPDNSDVDKLFIQLVQTYNQLFEENPINASGVDAKAILSARLSKSRRLENLIAQLPGEKKNGLFGNLIALSLGLTPNFKSNFDLAEDAKLQLSKDTYDDDLDNLLAQIGDQYADLFLAAKNLSDAILLSDILRVNTEITKAPLSASMIKRYDEHHQDLTLLKALVRQQLPEKYKEIFFDQSKNGYAGYIDGGASQEEFYKFIKPILEKMDGTEELLVKLNREDLLRKQRTFDNGSIPHQIHLGELHAILRRQEDFYPFLKDNREKIEKILTFRIPYYVGPLARGNSRFAWMTRKSEETITPWNFEEVVDKGASAQSFIERMTNFDKNLPNEKVLPKHSLLYEYFTVYNELTKVKYVTEGMRKPAFLSGEQKKAIVDLLFKTNRKVTVKQLKEDYFKKIECFDSVEISGVEDRFNASLGTYHDLLKIIKDKDFLDNEENEDILEDIVLTLTLFEDREMIEERLKTYAHLFDDKVMKQLKRRRYTGWGRLSRKLINGIRDKQSGKTILDFLKSDGFANRNFMQLIHDDSLTFKEDIQKAQVSGQGDSLHEHIANLAGSPAIKKGILQTVKVVDELVKVMGRHKPENIVIEMARENQTTQKGQKNSRERMKRIEEGIKELGSQILKEHPVENTQLQNEKLYLYYLQNGRDMYVDQELDINRLSDYDVDHIVPQSFLKDDSIDNKVLTRSDKARGKSDNVPSEEVVKKMKNYWRQLLNAKLITQRKFDNLTKAERGGLSELDKAGFIKRQLVETRQITKHVAQILDSRMNTKYDENDKLIREVKVITLKSKLVSDFRKDFQFYKVREINNYHHAHDAYLNAVVGTALIKKYPKLESEFVYGDYKVYDVRKMIAKSEQEIGKATAKYFFYSNIMNFFKTEITLANGEIRKRPLIETNGETGEIVWDKGRDFATVRKVLSMPQVNIVKKTEVQTGGFSKESILPKRNSDKLIARKKDWDPKKYGGFDSPTVAYSVLVVAKVEKGKSKKLKSVKELLGITIMERSSFEKNPIDFLEAKGYKEVKKDLIIKLPKYSLFELENGRKRMLASAGELQKGNELALPSKYVNFLYLASHYEKLKGSPEDNEQKQLFVEQHKHYLDEIIEQISEFSKRVILADANLDKVLSAYNKHRDKPIREQAENIIHLFTLTNLGAPAAFKYFDTTIDRKRYTSTKEVLDATLIHQSITGLYETRIDLSQLGGDGGGGGGGSEAAAKGGTLQLDDEYRLYSPLVKPDQNIQFWLEQFPQAWAETAGMGLAKQVPPQVIQLKASATPVSVRQYPLSKEAQEGIRPHVQRLIQQGILVPVQSPWNTPLLPVRKPGTNDYRPVQDLREVNKRVQDIHPTVPNPYNLLCALPPQRSWYTVLDLKDAFFCLRLHPTSQPLFAFEWRDPGTGRTGQLTWTRLPQGFKNSPTIFNEALHRDLANFRIQHPQVTLLQYVDDLLLAGATKQDCLEGTKALLLELSDLGYRASAKKAQICRREVTYLGYSLRDGQRWLTEARKKTVVQIPAPTTAKQVREFLGTAGFCRLWIPGFATLAAPLYPLTKPKGEFSWAPEHQKAFDAIKKALLSAPALALPDVTKPFTLYVDERKGVARGVLTQTLGPWRRPVAYLSKKLDPVASGWPVCLKAIAAVAILVKDADKLTLGQNITVIAPHALENIVRQPPDRWMTNARMTHYQSLLLTERVTFAPPAALNPATLLPEETDEPVTHDCHQLLIEETGVRKDLTDIPLTGEVLTWFTDGSSYVVEGKRMAGAAVVDGTRTIWASSLPEGTSAQKAELMALTQALRLAEGKSINIYTDSRYAFATAHVHGAIYKQRGWLTSAGREIKNKEEILSLLEALHLPKRLAIIHCPGHQKAKDPISRGNQMADRVAKQAAQGVNLLAGKRTADGSEFEKRTADGSEFESPKKKAKVE

SEQ ID NO: 21607 - protein, 2090 aa, synthetic construct; identical to SEQ ID NO: 21413

SEQ ID NO: 21608 - protein, 2109 aa, synthetic construct; identical to SEQ ID NO: 21414

SEQ ID NO: 21609 - protein, 2088 aa, synthetic construct
MPAAKRVKLDGGDKKYSIGLDIGTNSVGWAVITDEYKVPSKKFKVLGNTDRHSIKKNLIGALLFDSGETAEATRLKRTARRRYTRRKNRICYLQEIFSNEMAKVDDSFFHRLEESFLVEEDKKHERHPIFGNIVDEVAYHEKYPTIYHLRKKLVDSTDKADLRLIYLALAHMIKFRGHFLIEGDLNPDNSDVDKLFIQLVQTYNQLFEENPINASGVDAKAILSARLSKSRRLENLIAQLPGEKKNGLFGNLIALSLGLTPNFKSNFDLAEDAKLQLSKDTYDDDLDNLLAQIGDQYADLFLAAKNLSDAILLSDILRVNTEITKAPLSASMIKRYDEHHQDLTLLKALVRQQLPEKYKEIFFDQSKNGYAGYIDGGASQEEFYKFIKPILEKMDGTEELLVKLNREDLLRKQRTFDNGSIPHQIHLGELHAILRRQEDFYPFLKDNREKIEKILTFRIPYYVGPLARGNSRFAWMTRKSEETITPWNFEEVVDKGASAQSFIERMTNFDKNLPNEKVLPKHSLLYEYFTVYNELTKVKYVTEGMRKPAFLSGEQKKAIVDLLFKTNRKVTVKQLKEDYFKKIECFDSVEISGVEDRFNASLGTYHDLLKIIKDKDFLDNEENEDILEDIVLTLTLFEDREMIEERLKTYAHLFDDKVMKQLKRRRYTGWGRLSRKLINGIRDKQSGKTILDFLKSDGFANRNFMQLIHDDSLTFKEDIQKAQVSGQGDSLHEHIANLAGSPAIKKGILQTVKVVDELVKVMGRHKPENIVIEMARENQTTQKGQKNSRERMKRIEEGIKELGSQILKEHPVENTQLQNEKLYLYYLQNGRDMYVDQELDINRLSDYDVDHIVPQSFLKDDSIDNKVLTRSDKARGKSDNVPSEEVVKKMKNYWRQLLNAKLITQRKFDNLTKAERGGLSELDKAGFIKRQLVETRQITKHVAQILDSRMNTKYDENDKLIREVKVITLKSKLVSDFRKDFQFYKVREINNYHHAHDAYLNAVVGTALIKKYPKLESEFVYGDYKVYDVRKMIAKSEQEIGKATAKYFFYSNIMNFFKTEITLANGEIRKRPLIETNGETGEIVWDKGRDFATVRKVLSMPQVNIVKKTEVQTGGFSKESILPKRNSDKLIARKKDWDPKKYGGFDSPTVAYSVLVVAKVEKGKSKKLKSVKELLGITIMERSSFEKNPIDFLEAKGYKEVKKDLIIKLPKYSLFELENGRKRMLASAGELQKGNELALPSKYVNFLYLASHYEKLKGSPEDNEQKQLFVEQHKHYLDEIIEQISEFSKRVILADANLDKVLSAYNKHRDKPIREQAENIIHLFTLTNLGAPAAFKYFDTTIDRKRYTSTKEVLDATLIHQSITGLYETRIDLSQLGGDGGGGGPAPGSSGGTLQLDDEYRLYSPLVKPDQNIQFWLEQFPQAWAETAGMGLAKQVPPQVIQLKASATPVSVRQYPLSKEAQEGIRPHVQRLIQQGILVPVQSPWNTPLLPVRKPGTNDYRPVQDLREVNKRVQDIHPTVPNPYNLLCALPPQRSWYTVLDLKDAFFCLRLHPTSQPLFAFEWRDPGTGRTGQLTWTRLPQGFKNSPTIFNEALHRDLANFRIQHPQVTLLQYVDDLLLAGATKQDCLEGTKALLLELSDLGYRASAKKAQICRREVTYLGYSLRDGQRWLTEARKKTVVQIPAPTTAKQVREFLGTAGFCRLWIPGFATLAAPLYPLTKPKGEFSWAPEHQKAFDAIKKALLSAPALALPDVTKPFTLYVDERKGVARGVLTQTLGPWRRPVAYLSKKLDPVASGWPVCLKAIAAVAILVKDADKLTLGQNITVIAPHALENIVRQPPDRWMTNARMTHYQSLLLTERVTFAPPAALNPATLLPEETDEPVTHDCHQLLIEETGVRKDLTDIPLTGEVLTWFTDGSSYVVEGKRMAGAAVVDGTRTIWASSLPEGTSAQKAELMALTQALRLAEGKSINIYTDSRYAFATAHVHGAIYKQRGWLTSAGREIKNKEEILSLLEALHLPKRLAIIHCPGHQKAKDPISRGNQMADRVAKQAAQGVNLLAGKRTADGSEFEKRTADGSEFESPKKKAKVE

SEQ ID NO: 21610 - protein, 2082 aa, synthetic construct; identical to SEQ ID NO: 21416

SEQ ID NO: 21611 - protein, 2097 aa, synthetic construct; identical to SEQ ID NO: 21437

SEQ ID NO: 21612 - protein, 2090 aa, synthetic construct
MPAAKRVKLDGGDKKYSIGLDIGTNSVGWAVITDEYKVPSKKFKVLGNTDRHSIKKNLIGALLFDSGETAEATRLKRTARRRYTRRKNRICYLQEIFSNEMAKVDDSFFHRLEESFLVEEDKKHERHPIFGNIVDEVAYHEKYPTIYHLRKKLVDSTDKADLRLIYLALAHMIKFRGHFLIEGDLNPDNSDVDKLFIQLVQTYNQLFEENPINASGVDAKAILSARLSKSRRLENLIAQLPGEKKNGLFGNLIALSLGLTPNFKSNFDLAEDAKLQLSKDTYDDDLDNLLAQIGDQYADLFLAAKNLSDAILLSDILRVNTEITKAPLSASMIKRYDEHHQDLTLLKALVRQQLPEKYKEIFFDQSKNGYAGYIDGGASQEEFYKFIKPILEKMDGTEELLVKLNREDLLRKQRTFDNGSIPHQIHLGELHAILRRQEDFYPFLKDNREKIEKILTFRIPYYVGPLARGNSRFAWMTRKSEETITPWNFEEVVDKGASAQSFIERMTNFDKNLPNEKVLPKHSLLYEYFTVYNELTKVKYVTEGMRKPAFLSGEQKKAIVDLLFKTNRKVTVKQLKEDYFKKIECFDSVEISGVEDRFNASLGTYHDLLKIIKDKDFLDNEENEDILEDIVLTLTLFEDREMIEERLKTYAHLFDDKVMKQLKRRRYTGWGRLSRKLINGIRDKQSGKTILDFLKSDGFANRNFMQLIHDDSLTFKEDIQKAQVSGQGDSLHEHIANLAGSPAIKKGILQTVKVVDELVKVMGRHKPENIVIEMARENQTTQKGQKNSRERMKRIEEGIKELGSQILKEHPVENTQLQNEKLYLYYLQNGRDMYVDQELDINRLSDYDVDHIVPQSFLKDDSIDNKVLTRSDKARGKSDNVPSEEVVKKMKNYWRQLLNAKLITQRKFDNLTKAERGGLSELDKAGFIKRQLVETRQITKHVAQILDSRMNTKYDENDKLIREVKVITLKSKLVSDFRKDFQFYKVREINNYHHAHDAYLNAVVGTALIKKYPKLESEFVYGDYKVYDVRKMIAKSEQEIGKATAKYFFYSNIMNFFKTEITLANGEIRKRPLIETNGETGEIVWDKGRDFATVRKVLSMPQVNIVKKTEVQTGGFSKESILPKRNSDKLIARKKDWDPKKYGGFDSPTVAYSVLVVAKVEKGKSKKLKSVKELLGITIMERSSFEKNPIDFLEAKGYKEVKKDLIIKLPKYSLFELENGRKRMLASAGELQKGNELALPSKYVNFLYLASHYEKLKGSPEDNEQKQLFVEQHKHYLDEIIEQISEFSKRVILADANLDKVLSAYNKHRDKPIREQAENIIHLFTLTNLGAPAAFKYFDTTIDRKRYTSTKEVLDATLIHQSITGLYETRIDLSQLGGDGGGSSGGGEAAAKGGTLQLDDEYRLYSPLVKPDQNIQFWLEQFPQAWAETAGMGLAKQVPPQVIQLKASATPVSVRQYPLSKEAQEGIRPHVQRLIQQGILVPVQSPWNTPLLPVRKPGTNDYRPVQDLREVNKRVQDIHPTVPNPYNLLCALPPQRSWYTVLDLKDAFFCLRLHPTSQPLFAFEWRDPGTGRTGQLTWTRLPQGFKNSPTIFNEALHRDLANFRIQHPQVTLLQYVDDLLLAGATKQDCLEGTKALLLELSDLGYRASAKKAQICRREVTYLGYSLRDGQRWLTEARKKTVVQIPAPTTAKQVREFLGTAGFCRLWIPGFATLAAPLYPLTKPKGEFSWAPEHQKAFDAIKKALLSAPALALPDVTKPFTLYVDERKGVARGVLTQTLGPWRRPVAYLSKKLDPVASGWPVCLKAIAAVAILVKDADKLTLGQNITVIAPHALENIVRQPPDRWMTNARMTHYQSLLLTERVTFAPPAALNPATLLPEETDEPVTHDCHQLLIEETGVRKDLTDIPLTGEVLTWFTDGSSYVVEGKRMAGAAVVDGTRTIWASSLPEGTSAQKAELMALTQALRLAEGKSINIYTDSRYAFATAHVHGAIYKQRGWLTSAGREIKNKEEILSLLEALHLPKRLAIIHCPGHQKAKDPISRGNQMADRVAKQAAQGVNLLAGKRTADGSEFEKRTADGSEFESPKKKAKVE

SEQ ID NO: 21613 - protein, 2090 aa, synthetic construct; identical to SEQ ID NO: 21417

SEQ ID NO: 21614 - protein, 2090 aa, synthetic construct; identical to SEQ ID NO: 21420

SEQ ID NO: 21615 - protein, 2088 aa, synthetic construct
MPAAKRVKLDGGDKKYSIGLDIGTNSVGWAVITDEYKVPSKKFKVLGNTDRHSIKKNLIGALLFDSGETAEATRLKRTARRRYTRRKNRICYLQEIFSNEMAKVDDSFFHRLEESFLVEEDKKHERHPIFGNIVDEVAYHEKYPTIYHLRKKLVDSTDKADLRLIYLALAHMIKFRGHFLIEGDLNPDNSDVDKLFIQLVQTYNQLFEENPINASGVDAKAILSARLSKSRRLENLIAQLPGEKKNGLFGNLIALSLGLTPNFKSNFDLAEDAKLQLSKDTYDDDLDNLLAQIGDQYADLFLAAKNLSDAILLSDILRVNTEITKAPLSASMIKRYDEHHQDLTLLKALVRQQLPEKYKEIFFDQSKNGYAGYIDGGASQEEFYKFIKPILEKMDGTEELLVKLNREDLLRKQRTFDNGSIPHQIHLGELHAILRRQEDFYPFLKDNREKIEKILTFRIPYYVGPLARGNSRFAWMTRKSEETITPWNFEEVVDKGASAQSFIERMTNFDKNLPNEKVLPKHSLLYEYFTVYNELTKVKYVTEGMRKPAFLSGEQKKAIVDLLFKTNRKVTVKQLKEDYFKKIECFDSVEISGVEDRFNASLGTYHDLLKIIKDKDFLDNEENEDILEDIVLTLTLFEDREMIEERLKTYAHLFDDKVMKQLKRRRYTGWGRLSRKLINGIRDKQSGKTILDFLKSDGFANRNFMQLIHDDSLTFKEDIQKAQVSGQGDSLHEHIANLAGSPAIKKGILQTVKVVDELVKVMGRHKPENIVIEMARENQTTQKGQKNSRERMKRIEEGIKELGSQILKEHPVENTQLQNEKLYLYYLQNGRDMYVDQELDINRLSDYDVDHIVPQSFLKDDSIDNKVLTRSDKARGKSDNVPSEEVVKKMKNYWRQLLNAKLITQRKFDNLTKAERGGLSELDKAGFIKRQLVETRQITKHVAQILDSRMNTKYDENDKLIREVKVITLKSKLVSDFRKDFQFYKVREINNYHHAHDAYLNAVVGTALIKKYPKLESEFVYGDYKVYDVRKMIAKSEQEIGKATAKYFFYSNIMNFFKTEITLANGEIRKRPLIETNGETGEIVWDKGRDFATVRKVLSMPQVNIVKKTEVQTGGFSKESILPKRNSDKLIARKKDWDPKKYGGFDSPTVAYSVLVVAKVEKGKSKKLKSVKELLGITIMERSSFEKNPIDFLEAKGYKEVKKDLIIKLPKYSLFELENGRKRMLASAGELQKGNELALPSKYVNFLYLASHYEKLKGSPEDNEQKQLFVEQHKHYLDEIIEQISEFSKRVILADANLDKVLSAYNKHRDKPIREQAENIIHLFTLTNLGAPAAFKYFDTTIDRKRYTSTKEVLDATLIHQSITGLYETRIDLSQLGGDGGGGGGGSGSSGGTLQLDDEYRLYSPLVKPDQNIQFWLEQFPQAWAETAGMGLAKQVPPQVIQLKASATPVSVRQYPLSKEAQEGIRPHVQRLIQQGILVPVQSPWNTPLLPVRKPGTNDYRPVQDLREVNKRVQDIHPTVPNPYNLLCALPPQRSWYTVLDLKDAFFCLRLHPTSQPLFAFEWRDPGTGRTGQLTWTRLPQGFKNSPTIFNEALHRDLANFRIQHPQVTLLQYVDDLLLAGATKQDCLEGTKALLLELSDLGYRASAKKAQICRREVTYLGYSLRDGQRWLTEARKKTVVQIPAPTTAKQVREFLGTAGFCRLWIPGFATLAAPLYPLTKPKGEFSWAPEHQKAFDAIKKALLSAPALALPDVTKPFTLYVDERKGVARGVLTQTLGPWRRPVAYLSKKLDPVASGWPVCLKAIAAVAILVKDADKLTLGQNITVIAPHALENIVRQPPDRWMTNARMTHYQSLLLTERVTFAPPAALNPATLLPEETDEPVTHDCHQLLIEETGVRKDLTDIPLTGEVLTWFTDGSSYVVEGKRMAGAAVVDGTRTIWASSLPEGTSAQKAELMALTQALRLAEGKSINIYTDSRYAFATAHVHGAIYKQRGWLTSAGREIKNKEEILSLLEALHLPKRLAIIHCPGHQKAKDPISRGNQMADRVAKQAAQGVNLLAGKRTADGSEFEKRTADGSEFESPKKKAKVE

SEQ ID NO: 21616 - protein, 2090 aa, synthetic construct; identical to SEQ ID NO: 21433

SEQ ID NO: 21617 - protein, 2090 aa, synthetic construct
MPAAKRVKLDGGDKKYSIGLDIGTNSVGWAVITDEYKVPSKKFKVLGNTDRHSIKKNLIGALLFDSGETAEATRLKRTARRRYTRRKNRICYLQEIFSNEMAKVDDSFFHRLEESFLVEEDKKHERHPIFGNIVDEVAYHEKYPTIYHLRKKLVDSTDKADLRLIYLALAHMIKFRGHFLIEGDLNPDNSDVDKLFIQLVQTYNQLFEENPINASGVDAKAILSARLSKSRRLENLIAQLPGEKKNGLFGNLIALSLGLTPNFKSNFDLAEDAKLQLSKDTYDDDLDNLLAQIGDQYADLFLAAKNLSDAILLSDILRVNTEITKAPLSASMIKRYDEHHQDLTLLKALVRQQLPEKYKEIFFDQSKNGYAGYIDGGASQEEFYKFIKPILEKMDGTEELLVKLNREDLLRKQRTFDNGSIPHQIHLGELHAILRRQEDFYPFLKDNREKIEKILTFRIPYYVGPLARGNSRFAWMTRKSEETITPWNFEEVVDKGASAQSFIERMTNFDKNLPNEKVLPKHSLLYEYFTVYNELTKVKYVTEGMRKPAFLSGEQKKAIVDLLFKTNRKVTVKQLKEDYFKKIECFDSVEISGVEDRFNASLGTYHDLLKIIKDKDFLDNEENEDILEDIVLTLTLFEDREMIEERLKTYAHLFDDKVMKQLKRRRYTGWGRLSRKLINGIRDKQSGKTILDFLKSDGFANRNFMQLIHDDSLTFKEDIQKAQVSGQGDSLHEHIANLAGSPAIKKGILQTVKVVDELVKVMGRHKPENIVIEMARENQTTQKGQKNSRERMKRIEEGIKELGSQILKEHPVENTQLQNEKLYLYYLQNGRDMYVDQELDINRLSDYDVDHIVPQSFLKDDSIDNKVLTRSDKARGKSDNVPSEEVVKKMKNYWRQLLNAKLITQRKFDNLTKAERGGLSELDKAGFIKRQLVETRQITKHVAQILDSRMNTKYDENDKLIREVKVITLKSKLVSDFRKDFQFYKVREINNYHHAHDAYLNAVVGTALIKKYPKLESEFVYGDYKVYDVRKMIAKSEQEIGKATAKYFFYSNIMNFFKTEITLANGEIRKRPLIETNGETGEIVWDKGRDFATVRKVLSMPQVNIVKKTEVQTGGFSKESILPKRNSDKLIARKKDWDPKKYGGFDSPTVAYSVLVVAKVEKGKSKKLKSVKELLGITIMERSSFEKNPIDFLEAKGYKEVKKDLIIKLPKYSLFELENGRKRMLASAGELQKGNELALPSKYVNFLYLASHYEKLKGSPEDNEQKQLFVEQHKHYLDEIIEQISEFSKRVILADANLDKVLSAYNKHRDKPIREQAENIIHLFTLTNLGAPAAFKYFDTTIDRKRYTSTKEVLDATLIHQSITGLYETRIDLSQLGGDGGGGGEAAAKGGSGGTLQLDDEYRLYSPLVKPDQNIQFWLEQFPQAWAETAGMGLAKQVPPQVIQLKASATPVSVRQYPLSKEAQEGIRPHVQRLIQQGILVPVQSPWNTPLLPVRKPGTNDYRPVQDLREVNKRVQDIHPTVPNPYNLLCALPPQRSWYTVLDLKDAFFCLRLHPTSQPLFAFEWRDPGTGRTGQLTWTRLPQGFKNSPTIFNEALHRDLANFRIQHPQVTLLQYVDDLLLAGATKQDCLEGTKALLLELSDLGYRASAKKAQICRREVTYLGYSLRDGQRWLTEARKKTVVQIPAPTTAKQVREFLGTAGFCRLWIPGFATLAAPLYPLTKPKGEFSWAPEHQKAFDAIKKALLSAPALALPDVTKPFTLYVDERKGVARGVLTQTLGPWRRPVAYLSKKLDPVASGWPVCLKAIAAVAILVKDADKLTLGQNITVIAPHALENIVRQPPDRWMTNARMTHYQSLLLTERVTFAPPAALNPATLLPEETDEPVTHDCHQLLIEETGVRKDLTDIPLTGEVLTWFTDGSSYVVEGKRMAGAAVVDGTRTIWASSLPEGTSAQKAELMALTQALRLAEGKSINIYTDSRYAFATAHVHGAIYKQRGWLTSAGREIKNKEEILSLLEALHLPKRLAIIHCPGHQKAKDPISRGNQMADRVAKQAAQGVNLLAGKRTADGSEFEKRTADGSEFESPKKKAKVE

SEQ ID NO: 21618 - protein, 2090 aa, synthetic construct
MPAAKRVKLDGGDKKYSIGLDIGTNSVGWAVITDEYKVPSKKFKVLGNTDRHSIKKNLIGALLFDSGETAEATRLKRTARRRYTRRKNRICYLQEIFSNEMAKVDDSFFHRLEESFLVEEDKKHERHPIFGNIVDEVAYHEKYPTIYHLRKKLVDSTDKADLRLIYLALAHMIKFRGHFLIEGDLNPDNSDVDKLFIQLVQTYNQLFEENPINASGVDAKAILSARLSKSRRLENLIAQLPGEKKNGLFGNLIALSLGLTPNFKSNFDLAEDAKLQLSKDTYDDDLDNLLAQIGDQYADLFLAAKNLSDAILLSDILRVNTEITKAPLSASMIKRYDEHHQDLTLLKALVRQQLPEKYKEIFFDQSKNGYAGYIDGGASQEEFYKFIKPILEKMDGTEELLVKLNREDLLRKQRTFDNGSIPHQIHLGELHAILRRQEDFYPFLKDNREKIEKILTFRIPYYVGPLARGNSRFAWMTRKSEETITPWNFEEVVDKGASAQSFIERMTNFDKNLPNEKVLPKHSLLYEYFTVYNELTKVKYVTEGMRKPAFLSGEQKKAIVDLLFKTNRKVTVKQLKEDYFKKIECFDSVEISGVEDRFNASLGTYHDLLKIIKDKDFLDNEENEDILEDIVLTLTLFEDREMIEERLKTYAHLFDDKVMKQLKRRRYTGWGRLSRKLINGIRDKQSGKTILDFLKSDGFANRNFMQLIHDDSLTFKEDIQKAQVSGQGDSLHEHIANLAGSPAIKKGILQTVKVVDELVKVMGRHKPENIVIEMARENQTTQKGQKNSRERMKRIEEGIKELGSQILKEHPVENTQLQNEKLYLYYLQNGRDMYVDQELDINRLSDYDVDHIVPQSFLKDDSIDNKVLTRSDKARGKSDNVPSEEVVKKMKNYWRQLLNAKLITQRKFDNLTKAERGGLSELDKAGFIKRQLVETRQITKHVAQILDSRMNTKYDENDKLIREVKVITLKSKLVSDFRKDFQFYKVREINNYHHAHDAYLNAVVGTALIKKYPKLESEFVYGDYKVYDVRKMIAKSEQEIGKATAKYFFYSNIMNFFKTEITLANGEIRKRPLIETNGETGEIVWDKGRDFATVRKVLSMPQVNIVKKTEVQTGGFSKESILPKRNSDKLIARKKDWDPKKYGGFDSPTVAYSVLVVAKVEKGKSKKLKSVKELLGITIMERSSFEKNPIDFLEAKGYKEVKKDLIIKLPKYSLFELENGRKRMLASAGELQKGNELALPSKYVNFLYLASHYEKLKGSPEDNEQKQLFVEQHKHYLDEIIEQISEFSKRVILADANLDKVLSAYNKHRDKPIREQAENIIHLFTLTNLGAPAAFKYFDTTIDRKRYTSTKEVLDATLIHQSITGLYETRIDLSQLGGDGGGGSEAAAKGSSGGTLQLDDEYRLYSPLVKPDQNIQFWLEQFPQAWAETAGMGLAKQVPPQVIQLKASATPVSVRQYPLSKEAQEGIRPHVQRLIQQGILVPVQSPWNTPLLPVRKPGTNDYRPVQDLREVNKRVQDIHPTVPNPYNLLCALPPQRSWYTVLDLKDAFFCLRLHPTSQPLFAFEWRDPGTGRTGQLTWTRLPQGFKNSPTIFNEALHRDLANFRIQHPQVTLLQYVDDLLLAGATKQDCLEGTKALLLELSDLGYRASAKKAQICRREVTYLGYSLRDGQRWLTEARKKTVVQIPAPTTAKQVREFLGTAGFCRLWIPGFATLAAPLYPLTKPKGEFSWAPEHQKAFDAIKKALLSAPALALPDVTKPFTLYVDERKGVARGVLTQTLGPWRRPVAYLSKKLDPVASGWPVCLKAIAAVAILVKDADKLTLGQNITVIAPHALENIVRQPPDRWMTNARMTHYQSLLLTERVTFAPPAALNPATLLPEETDEPVTHDCHQLLIEETGVRKDLTDIPLTGEVLTWFTDGSSYVVEGKRMAGAAVVDGTRTIWASSLPEGTSAQKAELMALTQALRLAEGKSINIYTDSRYAFATAHVHGAIYKQRGWLTSAGREIKNKEEILSLLEALHLPKRLAIIHCPGHQKAKDPISRGNQMADRVAKQAAQGVNLLAGKRTADGSEFEKRTADGSEFESPKKKAKVE

SEQ ID NO: 21619 - protein, 2090 aa, synthetic construct
MPAAKRVKLDGGDKKYSIGLDIGTNSVGWAVITDEYKVPSKKFKVLGNTDRHSIKKNLIGALLFDSGETAEATRLKRTARRRYTRRKNRICYLQEIFSNEMAKVDDSFFHRLEESFLVEEDKKHERHPIFGNIVDEVAYHEKYPTIYHLRKKLVDSTDKADLRLIYLALAHMIKFRGHFLIEGDLNPDNSDVDKLFIQLVQTYNQLFEENPINASGVDAKAILSARLSKSRRLENLIAQLPGEKKNGLFGNLIALSLGLTPNFKSNFDLAEDAKLQLSKDTYDDDLDNLLAQIGDQYADLFLAAKNLSDAILLSDILRVNTEITKAPLSASMIKRYDEHHQDLTLLKALVRQQLPEKYKEIFFDQSKNGYAGYIDGGASQEEFYKFIKPILEKMDGTEELLVKLNREDLLRKQRTFDNGSIPHQIHLGELHAILRRQEDFYPFLKDNREKIEKILTFRIPYYVGPLARGNSRFAWMTRKSEETITPWNFEEVVDKGASAQSFIERMTNFDKNLPNEKVLPKHSLLYEYFTVYNELTKVKYVTEGMRKPAFLSGEQKKAIVDLLFKTNRKVTVKQLKEDYFKKIECFDSVEISGVEDRFNASLGTYHDLLKIIKDKDFLDNEENEDILEDIVLTLTLFEDREMIEERLKTYAHLFDDKVMKQLKRRRYTGWGRLSRKLINGIRDKQSGKTILDFLKSDGFANRNFMQLIHDDSLTFKEDIQKAQVSGQGDSLHEHIANLAGSPAIKKGILQTVKVVDELVKVMGRHKPENIVIEMARENQTTQKGQKNSRERMKRIEEGIKELGSQILKEHPVENTQLQNEKLYLYYLQNGRDMYVDQELDINRLSDYDVDHIVPQSFLKDDSIDNKVLTRSDKARGKSDNVPSEEVVKKMKNYWRQLLNAKLITQRKFDNLTKAERGGLSELDKAGFIKRQLVETRQITKHVAQILDSRMNTKYDENDKLIREVKVITLKSKLVSDFRKDFQFYKVREINNYHHAHDAYLNAVVGTALIKKYPKLESEFVYGDYKVYDVRKMIAKSEQEIGKATAKYFFYSNIMNFFKTEITLANGEIRKRPLIETNGETGEIVWDKGRDFATVRKVLSMPQVNIVKKTEVQTGGFSKESILPKRNSDKLIARKKDWDPKKYGGFDSPTVAYSVLVVAKVEKGKSKKLKSVKELLGITIMERSSFEKNPIDFLEAKGYKEVKKDLIIKLPKYSLFELENGRKRMLASAGELQKGNELALPSKYVNFLYLASHYEKLKGSPEDNEQKQLFVEQHKHYLDEIIEQISEFSKRVILADANLDKVLSAYNKHRDKPIREQAENIIHLFTLTNLGAPAAFKYFDTTIDRKRYTSTKEVLDATLIHQSITGLYETRIDLSQLGGDGGGGGEAAAKPAPGGTLQLDDEYRLYSPLVKPDQNIQFWLEQFPQAWAETAGMGLAKQVPPQVIQLKASATPVSVRQYPLSKEAQEGIRPHVQRLIQQGILVPVQSPWNTPLLPVRKPGTNDYRPVQDLREVNKRVQDIHPTVPNPYNLLCALPPQRSWYTVLDLKDAFFCLRLHPTSQPLFAFEWRDPGTGRTGQLTWTRLPQGFKNSPTIFNEALHRDLANFRIQHPQVTLLQYVDDLLLAGATKQDCLEGTKALLLELSDLGYRASAKKAQICRREVTYLGYSLRDGQRWLTEARKKTVVQIPAPTTAKQVREFLGTAGFCRLWIPGFATLAAPLYPLTKPKGEFSWAPEHQKAFDAIKKALLSAPALALPDVTKPFTLYVDERKGVARGVLTQTLGPWRRPVAYLSKKLDPVASGWPVCLKAIAAVAILVKDADKLTLGQNITVIAPHALENIVRQPPDRWMTNARMTHYQSLLLTERVTFAPPAALNPATLLPEETDEPVTHDCHQLLIEETGVRKDLTDIPLTGEVLTWFTDGSSYVVEGKRMAGAAVVDGTRTIWASSLPEGTSAQKAELMALTQALRLAEGKSINIYTDSRYAFATAHVHGAIYKQRGWLTSAGREIKNKEEILSLLEALHLPKRLAIIHCPGHQKAKDPISRGNQMADRVAKQAAQGVNLLAGKRTADGSEFEKRTADGSEFESPKKKAKVE

SEQ ID NO: 21620 - protein, 2087 aa, synthetic construct; identical to SEQ ID NO: 21424

SEQ ID NO: 21621 - protein, 2082 aa, synthetic construct
MPAAKRVKLDGGDKKYSIGLDIGTNSVGWAVITDEYKVPSKKFKVLGNTDRHSIKKNLIGALLFDSGETAEATRLKRTARRRYTRRKNRICYLQEIFSNEMAKVDDSFFHRLEESFLVEEDKKHERHPIFGNIVDEVAYHEKYPTIYHLRKKLVDSTDKADLRLIYLALAHMIKFRGHFLIEGDLNPDNSDVDKLFIQLVQTYNQLFEENPINASGVDAKAILSARLSKSRRLENLIAQLPGEKKNGLFGNLIALSLGLTPNFKSNFDLAEDAKLQLSKDTYDDDLDNLLAQIGDQYADLFLAAKNLSDAILLSDILRVNTEITKAPLSASMIKRYDEHHQDLTLLKALVRQQLPEKYKEIFFDQSKNGYAGYIDGGASQEEFYKFIKPILEKMDGTEELLVKLNREDLLRKQRTFDNGSIPHQIHLGELHAILRRQEDFYPFLKDNREKIEKILTFRIPYYVGPLARGNSRFAWMTRKSEETITPWNFEEVVDKGASAQSFIERMTNFDKNLPNEKVLPKHSLLYEYFTVYNELTKVKYVTEGMRKPAFLSGEQKKAIVDLLFKTNRKVTVKQLKEDYFKKIECFDSVEISGVEDRFNASLGTYHDLLKIIKDKDFLDNEENEDILEDIVLTLTLFEDREMIEERLKTYAHLFDDKVMKQLKRRRYTGWGRLSRKLINGIRDKQSGKTILDFLKSDGFANRNFMQLIHDDSLTFKEDIQKAQVSGQGDSLHEHIANLAGSPAIKKGILQTVKVVDELVKVMGRHKPENIVIEMARENQTTQKGQKNSRERMKRIEEGIKELGSQILKEHPVENTQLQNEKLYLYYLQNGRDMYVDQELDINRLSDYDVDHIVPQSFLKDDSIDNKVLTRSDKARGKSDNVPSEEVVKKMKNYWRQLLNAKLITQRKFDNLTKAERGGLSELDKAGFIKRQLVETRQITKHVAQILDSRMNTKYDENDKLIREVKVITLKSKLVSDFRKDFQFYKVREINNYHHAHDAYLNAVVGTALIKKYPKLESEFVYGDYKVYDVRKMIAKSEQEIGKATAKYFFYSNIMNFFKTEITLANGEIRKRPLIETNGETGEIVWDKGRDFATVRKVLSMPQVNIVKKTEVQTGGFSKESILPKRNSDKLIARKKDWDPKKYGGFDSPTVAYSVLVVAKVEKGKSKKLKSVKELLGITIMERSSFEKNPIDFLEAKGYKEVKKDLIIKLPKYSLFELENGRKRMLASAGELQKGNELALPSKYVNFLYLASHYEKLKGSPEDNEQKQLFVEQHKHYLDEIIEQISEFSKRVILADANLDKVLSAYNKHRDKPIREQAENIIHLFTLTNLGAPAAFKYFDTTIDRKRYTSTKEVLDATLIHQSITGLYETRIDLSQLGGDGGGGSGGTLQLDDEYRLYSPLVKPDQNIQFWLEQFPQAWAETAGMGLAKQVPPQVIQLKASATPVSVRQYPLSKEAQEGIRPHVQRLIQQGILVPVQSPWNTPLLPVRKPGTNDYRPVQDLREVNKRVQDIHPTVPNPYNLLCALPPQRSWYTVLDLKDAFFCLRLHPTSQPLFAFEWRDPGTGRTGQLTWTRLPQGFKNSPTIFNEALHRDLANFRIQHPQVTLLQYVDDLLLAGATKQDCLEGTKALLLELSDLGYRASAKKAQICRREVTYLGYSLRDGQRWLTEARKKTVVQIPAPTTAKQVREFLGTAGFCRLWIPGFATLAAPLYPLTKPKGEFSWAPEHQKAFDAIKKALLSAPALALPDVTKPFTLYVDERKGVARGVLTQTLGPWRRPVAYLSKKLDPVASGWPVCLKAIAAVAILVKDADKLTLGQNITVIAPHALENIVRQPPDRWMTNARMTHYQSLLLTERVTFAPPAALNPATLLPEETDEPVTHDCHQLLIEETGVRKDLTDIPLTGEVLTWFTDGSSYVVEGKRMAGAAVVDGTRTIWASSLPEGTSAQKAELMALTQALRLAEGKSINIYTDSRYAFATAHVHGAIYKQRGWLTSAGREIKNKEEILSLLEALHLPKRLAIIHCPGHQKAKDPISRGNQMADRVAKQAAQGVNLLAGKRTADGSEFEKRTADGSEFESPKKKAKVE

SEQ ID NO: 21622 - protein, 2090 aa, synthetic construct; identical to SEQ ID NO: 21427

SEQ ID NO: 21623 - protein, 2095 aa, synthetic construct; identical to SEQ ID NO: 21418

SEQ ID NO: 21624 - protein, 2085 aa, synthetic construct; identical to SEQ ID NO: 21438

SEQ ID NO: 21625 - protein, 2090 aa, synthetic construct; identical to SEQ ID NO: 21455

SEQ ID NO: 21626 - protein, 2090 aa, synthetic construct
MPAAKRVKLDGGDKKYSIGLDIGTNSVGWAVITDEYKVPSKKFKVLGNTDRHSIKKNLIGALLFDSGETAEATRLKRTARRRYTRRKNRICYLQEIFSNEMAKVDDSFFHRLEESFLVEEDKKHERHPIFGNIVDEVAYHEKYPTIYHLRKKLVDSTDKADLRLIYLALAHMIKFRGHFLIEGDLNPDNSDVDKLFIQLVQTYNQLFEENPINASGVDAKAILSARLSKSRRLENLIAQLPGEKKNGLFGNLIALSLGLTPNFKSNFDLAEDAKLQLSKDTYDDDLDNLLAQIGDQYADLFLAAKNLSDAILLSDILRVNTEITKAPLSASMIKRYDEHHQDLTLLKALVRQQLPEKYKEIFFDQSKNGYAGYIDGGASQEEFYKFIKPILEKMDGTEELLVKLNREDLLRKQRTFDNGSIPHQIHLGELHAILRRQEDFYPFLKDNREKIEKILTFRIPYYVGPLARGNSRFAWMTRKSEETITPWNFEEVVDKGASAQSFIERMTNFDKNLPNEKVLPKHSLLYEYFTVYNELTKVKYVTEGMRKPAFLSGEQKKAIVDLLFKTNRKVTVKQLKEDYFKKIECFDSVEISGVEDRFNASLGTYHDLLKIIKDKDFLDNEENEDILEDIVLTLTLFEDREMIEERLKTYAHLFDDKVMKQLKRRRYTGWGRLSRKLINGIRDKQSGKTILDFLKSDGFANRNFMQLIHDDSLTFKEDIQKAQVSGQGDSLHEHIANLAGSPAIKKGILQTVKVVDELVKVMGRHKPENIVIEMARENQTTQKGQKNSRERMKRIEEGIKELGSQILKEHPVENTQLQNEKLYLYYLQNGRDMYVDQELDINRLSDYDVDHIVPQSFLKDDSIDNKVLTRSDKARGKSDNVPSEEVVKKMKNYWRQLLNAKLITQRKFDNLTKAERGGLSELDKAGFIKRQLVETRQITKHVAQILDSRMNTKYDENDKLIREVKVITLKSKLVSDFRKDFQFYKVREINNYHHAHDAYLNAVVGTALIKKYPKLESEFVYGDYKVYDVRKMIAKSEQEIGKATAKYFFYSNIMNFFKTEITLANGEIRKRPLIETNGETGEIVWDKGRDFATVRKVLSMPQVNIVKKTEVQTGGFSKESILPKRNSDKLIARKKDWDPKKYGGFDSPTVAYSVLVVAKVEKGKSKKLKSVKELLGITIMERSSFEKNPIDFLEAKGYKEVKKDLIIKLPKYSLFELENGRKRMLASAGELQKGNELALPSKYVNFLYLASHYEKLKGSPEDNEQKQLFVEQHKHYLDEIIEQISEFSKRVILADANLDKVLSAYNKHRDKPIREQAENIIHLFTLTNLGAPAAFKYFDTTIDRKRYTSTKEVLDATLIHQSITGLYETRIDLSQLGGDGGPAPEAAAKGGSGGTLQLDDEYRLYSPLVKPDQNIQFWLEQFPQAWAETAGMGLAKQVPPQVIQLKASATPVSVRQYPLSKEAQEGIRPHVQRLIQQGILVPVQSPWNTPLLPVRKPGTNDYRPVQDLREVNKRVQDIHPTVPNPYNLLCALPPQRSWYTVLDLKDAFFCLRLHPTSQPLFAFEWRDPGTGRTGQLTWTRLPQGFKNSPTIFNEALHRDLANFRIQHPQVTLLQYVDDLLLAGATKQDCLEGTKALLLELSDLGYRASAKKAQICRREVTYLGYSLRDGQRWLTEARKKTVVQIPAPTTAKQVREFLGTAGFCRLWIPGFATLAAPLYPLTKPKGEFSWAPEHQKAFDAIKKALLSAPALALPDVTKPFTLYVDERKGVARGVLTQTLGPWRRPVAYLSKKLDPVASGWPVCLKAIAAVAILVKDADKLTLGQNITVIAPHALENIVRQPPDRWMTNARMTHYQSLLLTERVTFAPPAALNPATLLPEETDEPVTHDCHQLLIEETGVRKDLTDIPLTGEVLTWFTDGSSYVVEGKRMAGAAVVDGTRTIWASSLPEGTSAQKAELMALTQALRLAEGKSINIYTDSRYAFATAHVHGAIYKQRGWLTSAGREIKNKEEILSLLEALHLPKRLAIIHCPGHQKAKDPISRGNQMADRVAKQAAQGVNLLAGKRTADGSEFEKRTADGSEFESPKKKAKVE

SEQ ID NO: 21627 - protein, 2085 aa, synthetic construct
MPAAKRVKLDGGDKKYSIGLDIGTNSVGWAVITDEYKVPSKKFKVLGNTDRHSIKKNLIGALLFDSGETAEATRLKRTARRRYTRRKNRICYLQEIFSNEMAKVDDSFFHRLEESFLVEEDKKHERHPIFGNIVDEVAYHEKYPTIYHLRKKLVDSTDKADLRLIYLALAHMIKFRGHFLIEGDLNPDNSDVDKLFIQLVQTYNQLFEENPINASGVDAKAILSARLSKSRRLENLIAQLPGEKKNGLFGNLIALSLGLTPNFKSNFDLAEDAKLQLSKDTYDDDLDNLLAQIGDQYADLFLAAKNLSDAILLSDILRVNTEITKAPLSASMIKRYDEHHQDLTLLKALVRQQLPEKYKEIFFDQSKNGYAGYIDGGASQEEFYKFIKPILEKMDGTEELLVKLNREDLLRKQRTFDNGSIPHQIHLGELHAILRRQEDFYPFLKDNREKIEKILTFRIPYYVGPLARGNSRFAWMTRKSEETITPWNFEEVVDKGASAQSFIERMTNFDKNLPNEKVLPKHSLLYEYFTVYNELTKVKYVTEGMRKPAFLSGEQKKAIVDLLFKTNRKVTVKQLKEDYFKKIECFDSVEISGVEDRFNASLGTYHDLLKIIKDKDFLDNEENEDILEDIVLTLTLFEDREMIEERLKTYAHLFDDKVMKQLKRRRYTGWGRLSRKLINGIRDKQSGKTILDFLKSDGFANRNFMQLIHDDSLTFKEDIQKAQVSGQGDSLHEHIANLAGSPAIKKGILQTVKVVDELVKVMGRHKPENIVIEMARENQTTQKGQKNSRERMKRIEEGIKELGSQILKEHPVENTQLQNEKLYLYYLQNGRDMYVDQELDINRLSDYDVDHIVPQSFLKDDSIDNKVLTRSDKARGKSDNVPSEEVVKKMKNYWRQLLNAKLITQRKFDNLTKAERGGLSELDKAGFIKRQLVETRQITKHVAQILDSRMNTKYDENDKLIREVKVITLKSKLVSDFRKDFQFYKVREINNYHHAHDAYLNAVVGTALIKKYPKLESEFVYGDYKVYDVRKMIAKSEQEIGKATAKYFFYSNIMNFFKTEITLANGEIRKRPLIETNGETGEIVWDKGRDFATVRKVLSMPQVNIVKKTEVQTGGFSKESILPKRNSDKLIARKKDWDPKKYGGFDSPTVAYSVLVVAKVEKGKSKKLKSVKELLGITIMERSSFEKNPIDFLEAKGYKEVKKDLIIKLPKYSLFELENGRKRMLASAGELQKGNELALPSKYVNFLYLASHYEKLKGSPEDNEQKQLFVEQHKHYLDEIIEQISEFSKRVILADANLDKVLSAYNKHRDKPIREQAENIIHLFTLTNLGAPAAFKYFDTTIDRKRYTSTKEVLDATLIHQSITGLYETRIDLSQLGGDGGPAPGGGGGTLQLDDEYRLYSPLVKPDQNIQFWLEQFPQAWAETAGMGLAKQVPPQVIQLKASATPVSVRQYPLSKEAQEGIRPHVQRLIQQGILVPVQSPWNTPLLPVRKPGTNDYRPVQDLREVNKRVQDIHPTVPNPYNLLCALPPQRSWYTVLDLKDAFFCLRLHPTSQPLFAFEWRDPGTGRTGQLTWTRLPQGFKNSPTIFNEALHRDLANFRIQHPQVTLLQYVDDLLLAGATKQDCLEGTKALLLELSDLGYRASAKKAQICRREVTYLGYSLRDGQRWLTEARKKTVVQIPAPTTAKQVREFLGTAGFCRLWIPGFATLAAPLYPLTKPKGEFSWAPEHQKAFDAIKKALLSAPALALPDVTKPFTLYVDERKGVARGVLTQTLGPWRRPVAYLSKKLDPVASGWPVCLKAIAAVAILVKDADKLTLGQNITVIAPHALENIVRQPPDRWMTNARMTHYQSLLLTERVTFAPPAALNPATLLPEETDEPVTHDCHQLLIEETGVRKDLTDIPLTGEVLTWFTDGSSYVVEGKRMAGAAVVDGTRTIWASSLPEGTSAQKAELMALTQALRLAEGKSINIYTDSRYAFATAHVHGAIYKQRGWLTSAGREIKNKEEILSLLEALHLPKRLAIIHCPGHQKAKDPISRGNQMADRVAKQAAQGVNLLAGKRTADGSEFEKRTADGSEFESPKKKAKVE

SEQ ID NO: 21628 - protein, 2083 aa, synthetic construct; identical to SEQ ID NO: 21444

SEQ ID NO: 21629 - protein, 2090 aa, synthetic construct; identical to SEQ ID NO: 21441

SEQ ID NO: 21630 - protein, 2087 aa, synthetic construct; identical to SEQ ID NO: 21453

SEQ ID NO: 21631 - protein, 2088 aa, synthetic construct
MPAAKRVKLDGGDKKYSIGLDIGTNSVGWAVITDEYKVPSKKFKVLGNTDRHSIKKNLIGALLFDSGETAEATRLKRTARRRYTRRKNRICYLQEIFSNEMAKVDDSFFHRLEESFLVEEDKKHERHPIFGNIVDEVAYHEKYPTIYHLRKKLVDSTDKADLRLIYLALAHMIKFRGHFLIEGDLNPDNSDVDKLFIQLVQTYNQLFEENPINASGVDAKAILSARLSKSRRLENLIAQLPGEKKNGLFGNLIALSLGLTPNFKSNFDLAEDAKLQLSKDTYDDDLDNLLAQIGDQYADLFLAAKNLSDAILLSDILRVNTEITKAPLSASMIKRYDEHHQDLTLLKALVRQQLPEKYKEIFFDQSKNGYAGYIDGGASQEEFYKFIKPILEKMDGTEELLVKLNREDLLRKQRTFDNGSIPHQIHLGELHAILRRQEDFYPFLKDNREKIEKILTFRIPYYVGPLARGNSRFAWMTRKSEETITPWNFEEVVDKGASAQSFIERMTNFDKNLPNEKVLPKHSLLYEYFTVYNELTKVKYVTEGMRKPAFLSGEQKKAIVDLLFKTNRKVTVKQLKEDYFKKIECFDSVEISGVEDRFNASLGTYHDLLKIIKDKDFLDNEENEDILEDIVLTLTLFEDREMIEERLKTYAHLFDDKVMKQLKRRRYTGWGRLSRKLINGIRDKQSGKTILDFLKSDGFANRNFMQLIHDDSLTFKEDIQKAQVSGQGDSLHEHIANLAGSPAIKKGILQTVKVVDELVKVMGRHKPENIVIEMARENQTTQKGQKNSRERMKRIEEGIKELGSQILKEHPVENTQLQNEKLYLYYLQNGRDMYVDQELDINRLSDYDVDHIVPQSFLKDDSIDNKVLTRSDKARGKSDNVPSEEVVKKMKNYWRQLLNAKLITQRKFDNLTKAERGGLSELDKAGFIKRQLVETRQITKHVAQILDSRMNTKYDENDKLIREVKVITLKSKLVSDFRKDFQFYKVREINNYHHAHDAYLNAVVGTALIKKYPKLESEFVYGDYKVYDVRKMIAKSEQEIGKATAKYFFYSNIMNFFKTEITLANGEIRKRPLIETNGETGEIVWDKGRDFATVRKVLSMPQVNIVKKTEVQTGGFSKESILPKRNSDKLIARKKDWDPKKYGGFDSPTVAYSVLVVAKVEKGKSKKLKSVKELLGITIMERSSFEKNPIDFLEAKGYKEVKKDLIIKLPKYSLFELENGRKRMLASAGELQKGNELALPSKYVNFLYLASHYEKLKGSPEDNEQKQLFVEQHKHYLDEIIEQISEFSKRVILADANLDKVLSAYNKHRDKPIREQAENIIHLFTLTNLGAPAAFKYFDTTIDRKRYTSTKEVLDATLIHQSITGLYETRIDLSQLGGDGGGGSGGGGSSGGTLQLDDEYRLYSPLVKPDQNIQFWLEQFPQAWAETAGMGLAKQVPPQVIQLKASATPVSVRQYPLSKEAQEGIRPHVQRLIQQGILVPVQSPWNTPLLPVRKPGTNDYRPVQDLREVNKRVQDIHPTVPNPYNLLCALPPQRSWYTVLDLKDAFFCLRLHPTSQPLFAFEWRDPGTGRTGQLTWTRLPQGFKNSPTIFNEALHRDLANFRIQHPQVTLLQYVDDLLLAGATKQDCLEGTKALLLELSDLGYRASAKKAQICRREVTYLGYSLRDGQRWLTEARKKTVVQIPAPTTAKQVREFLGTAGFCRLWIPGFATLAAPLYPLTKPKGEFSWAPEHQKAFDAIKKALLSAPALALPDVTKPFTLYVDERKGVARGVLTQTLGPWRRPVAYLSKKLDPVASGWPVCLKAIAAVAILVKDADKLTLGQNITVIAPHALENIVRQPPDRWMTNARMTHYQSLLLTERVTFAPPAALNPATLLPEETDEPVTHDCHQLLIEETGVRKDLTDIPLTGEVLTWFTDGSSYVVEGKRMAGAAVVDGTRTIWASSLPEGTSAQKAELMALTQALRLAEGKSINIYTDSRYAFATAHVHGAIYKQRGWLTSAGREIKNKEEILSLLEALHLPKRLAIIHCPGHQKAKDPISRGNQMADRVAKQAAQGVNLLAGKRTADGSEFEKRTADGSEFESPKKKAKVE

SEQ ID NO: 21632 - protein, 2104 aa, synthetic construct; identical to SEQ ID NO: 21445

SEQ ID NO: 21633 - protein, 2088 aa, synthetic construct; identical to SEQ ID NO: 21464

SEQ ID NO: 21634 - protein, 2088 aa, synthetic construct; identical to SEQ ID NO: 21457

SEQ ID NO: 21635 - protein, 2088 aa, synthetic construct; identical to SEQ ID NO: 21468

SEQ ID NO: 21636 - protein, 2090 aa, synthetic construct; identical to SEQ ID NO: 21436

SEQ ID NO: 21637 - protein, 2094 aa, synthetic construct
MPAAKRVKLDGGDKKYSIGLDIGTNSVGWAVITDEYKVPSKKFKVLGNTDRHSIKKNLIGALLFDSGETAEATRLKRTARRRYTRRKNRICYLQEIFSNEMAKVDDSFFHRLEESFLVEEDKKHERHPIFGNIVDEVAYHEKYPTIYHLRKKLVDSTDKADLRLIYLALAHMIKFRGHFLIEGDLNPDNSDVDKLFIQLVQTYNQLFEENPINASGVDAKAILSARLSKSRRLENLIAQLPGEKKNGLFGNLIALSLGLTPNFKSNFDLAEDAKLQLSKDTYDDDLDNLLAQIGDQYADLFLAAKNLSDAILLSDILRVNTEITKAPLSASMIKRYDEHHQDLTLLKALVRQQLPEKYKEIFFDQSKNGYAGYIDGGASQEEFYKFIKPILEKMDGTEELLVKLNREDLLRKQRTFDNGSIPHQIHLGELHAILRRQEDFYPFLKDNREKIEKILTFRIPYYVGPLARGNSRFAWMTRKSEETITPWNFEEVVDKGASAQSFIERMTNFDKNLPNEKVLPKHSLLYEYFTVYNELTKVKYVTEGMRKPAFLSGEQKKAIVDLLFKTNRKVTVKQLKEDYFKKIECFDSVEISGVEDRFNASLGTYHDLLKIIKDKDFLDNEENEDILEDIVLTLTLFEDREMIEERLKTYAHLFDDKVMKQLKRRRYTGWGRLSRKLINGIRDKQSGKTILDFLKSDGFANRNFMQLIHDDSLTFKEDIQKAQVSGQGDSLHEHIANLAGSPAIKKGILQTVKVVDELVKVMGRHKPENIVIEMARENQTTQKGQKNSRERMKRIEEGIKELGSQILKEHPVENTQLQNEKLYLYYLQNGRDMYVDQELDINRLSDYDVDHIVPQSFLKDDSIDNKVLTRSDKARGKSDNVPSEEVVKKMKNYWRQLLNAKLITQRKFDNLTKAERGGLSELDKAGFIKRQLVETRQITKHVAQILDSRMNTKYDENDKLIREVKVITLKSKLVSDFRKDFQFYKVREINNYHHAHDAYLNAVVGTALIKKYPKLESEFVYGDYKVYDVRKMIAKSEQEIGKATAKYFFYSNIMNFFKTEITLANGEIRKRPLIETNGETGEIVWDKGRDFATVRKVLSMPQVNIVKKTEVQTGGFSKESILPKRNSDKLIARKKDWDPKKYGGFDSPTVAYSVLVVAKVEKGKSKKLKSVKELLGITIMERSSFEKNPIDFLEAKGYKEVKKDLIIKLPKYSLFELENGRKRMLASAGELQKGNELALPSKYVNFLYLASHYEKLKGSPEDNEQKQLFVEQHKHYLDEIIEQISEFSKRVILADANLDKVLSAYNKHRDKPIREQAENIIHLFTLTNLGAPAAFKYFDTTIDRKRYTSTKEVLDATLIHQSITGLYETRIDLSQLGGDGGEAAAKGGGGSEAAAKGGTLQLDDEYRLYSPLVKPDQNIQFWLEQFPQAWAETAGMGLAKQVPPQVIQLKASATPVSVRQYPLSKEAQEGIRPHVQRLIQQGILVPVQSPWNTPLLPVRKPGTNDYRPVQDLREVNKRVQDIHPTVPNPYNLLCALPPQRSWYTVLDLKDAFFCLRLHPTSQPLFAFEWRDPGTGRTGQLTWTRLPQGFKNSPTIFNEALHRDLANFRIQHPQVTLLQYVDDLLLAGATKQDCLEGTKALLLELSDLGYRASAKKAQICRREVTYLGYSLRDGQRWLTEARKKTVVQIPAPTTAKQVREFLGTAGFCRLWIPGFATLAAPLYPLTKPKGEFSWAPEHQKAFDAIKKALLSAPALALPDVTKPFTLYVDERKGVARGVLTQTLGPWRRPVAYLSKKLDPVASGWPVCLKAIAAVAILVKDADKLTLGQNITVIAPHALENIVRQPPDRWMTNARMTHYQSLLLTERVTFAPPAALNPATLLPEETDEPVTHDCHQLLIEETGVRKDLTDIPLTGEVLTWFTDGSSYVVEGKRMAGAAVVDGTRTIWASSLPEGTSAQKAELMALTQALRLAEGKSINIYTDSRYAFATAHVHGAIYKQRGWLTSAGREIKNKEEILSLLEALHLPKRLAIIHCPGHQKAKDPISRGNQMADRVAKQAAQGVNLLAGKRTADGSEFEKRTADGSEFESPKKKAKVE

SEQ ID NO: 21638 - protein, 2087 aa, synthetic construct
MPAAKRVKLDGGDKKYSIGLDIGTNSVGWAVITDEYKVPSKKFKVLGNTDRHSIKKNLIGALLFDSGETAEATRLKRTARRRYTRRKNRICYLQEIFSNEMAKVDDSFFHRLEESFLVEEDKKHERHPIFGNIVDEVAYHEKYPTIYHLRKKLVDSTDKADLRLIYLALAHMIKFRGHFLIEGDLNPDNSDVDKLFIQLVQTYNQLFEENPINASGVDAKAILSARLSKSRRLENLIAQLPGEKKNGLFGNLIALSLGLTPNFKSNFDLAEDAKLQLSKDTYDDDLDNLLAQIGDQYADLFLAAKNLSDAILLSDILRVNTEITKAPLSASMIKRYDEHHQDLTLLKALVRQQLPEKYKEIFFDQSKNGYAGYIDGGASQEEFYKFIKPILEKMDGTEELLVKLNREDLLRKQRTFDNGSIPHQIHLGELHAILRRQEDFYPFLKDNREKIEKILTFRIPYYVGPLARGNSRFAWMTRKSEETITPWNFEEVVDKGASAQSFIERMTNFDKNLPNEKVLPKHSLLYEYFTVYNELTKVKYVTEGMRKPAFLSGEQKKAIVDLLFKTNRKVTVKQLKEDYFKKIECFDSVEISGVEDRFNASLGTYHDLLKIIKDKDFLDNEENEDILEDIVLTLTLFEDREMIEERLKTYAHLFDDKVMKQLKRRRYTGWGRLSRKLINGIRDKQSGKTILDFLKSDGFANRNFMQLIHDDSLTFKEDIQKAQVSGQGDSLHEHIANLAGSPAIKKGILQTVKVVDELVKVMGRHKPENIVIEMARENQTTQKGQKNSRERMKRIEEGIKELGSQILKEHPVENTQLQNEKLYLYYLQNGRDMYVDQELDINRLSDYDVDHIVPQSFLKDDSIDNKVLTRSDKARGKSDNVPSEEVVKKMKNYWRQLLNAKLITQRKFDNLTKAERGGLSELDKAGFIKRQLVETRQITKHVAQILDSRMNTKYDENDKLIREVKVITLKSKLVSDFRKDFQFYKVREINNYHHAHDAYLNAVVGTALIKKYPKLESEFVYGDYKVYDVRKMIAKSEQEIGKATAKYFFYSNIMNFFKTEITLANGEIRKRPLIETNGETGEIVWDKGRDFATVRKVLSMPQVNIVKKTEVQTGGFSKESILPKRNSDKLIARKKDWDPKKYGGFDSPTVAYSVLVVAKVEKGKSKKLKSVKELLGITIMERSSFEKNPIDFLEAKGYKEVKKDLIIKLPKYSLFELENGRKRMLASAGELQKGNELALPSKYVNFLYLASHYEKLKGSPEDNEQKQLFVEQHKHYLDEIIEQISEFSKRVILADANLDKVLSAYNKHRDKPIREQAENIIHLFTLTNLGAPAAFKYFDTTIDRKRYTSTKEVLDATLIHQSITGLYETRIDLSQLGGDGGEAAAKPAPGGTLQLDDEYRLYSPLVKPDQNIQFWLEQFPQAWAETAGMGLAKQVPPQVIQLKASATPVSVRQYPLSKEAQEGIRPHVQRLIQQGILVPVQSPWNTPLLPVRKPGTNDYRPVQDLREVNKRVQDIHPTVPNPYNLLCALPPQRSWYTVLDLKDAFFCLRLHPTSQPLFAFEWRDPGTGRTGQLTWTRLPQGFKNSPTIFNEALHRDLANFRIQHPQVTLLQYVDDLLLAGATKQDCLEGTKALLLELSDLGYRASAKKAQICRREVTYLGYSLRDGQRWLTEARKKTVVQIPAPTTAKQVREFLGTAGFCRLWIPGFATLAAPLYPLTKPKGEFSWAPEHQKAFDAIKKALLSAPALALPDVTKPFTLYVDERKGVARGVLTQTLGPWRRPVAYLSKKLDPVASGWPVCLKAIAAVAILVKDADKLTLGQNITVIAPHALENIVRQPPDRWMTNARMTHYQSLLLTERVTFAPPAALNPATLLPEETDEPVTHDCHQLLIEETGVRKDLTDIPLTGEVLTWFTDGSSYVVEGKRMAGAAVVDGTRTIWASSLPEGTSAQKAELMALTQALRLAEGKSINIYTDSRYAFATAHVHGAIYKQRGWLTSAGREIKNKEEILSLLEALHLPKRLAIIHCPGHQKAKDPISRGNQMADRVAKQAAQGVNLLAGKRTADGSEFEKRTADGSEFESPKKKAKVE

SEQ ID NO: 21639 - protein, 2088 aa, synthetic construct; identical to SEQ ID NO: 131

SEQ ID NO: 21640 - protein, 2085 aa, synthetic construct
MPAAKRVKLDGGDKKYSIGLDIGTNSVGWAVITDEYKVPSKKFKVLGNTDRHSIKKNLIGALLFDSGETAEATRLKRTARRRYTRRKNRICYLQEIFSNEMAKVDDSFFHRLEESFLVEEDKKHERHPIFGNIVDEVAYHEKYPTIYHLRKKLVDSTDKADLRLIYLALAHMIKFRGHFLIEGDLNPDNSDVDKLFIQLVQTYNQLFEENPINASGVDAKAILSARLSKSRRLENLIAQLPGEKKNGLFGNLIALSLGLTPNFKSNFDLAEDAKLQLSKDTYDDDLDNLLAQIGDQYADLFLAAKNLSDAILLSDILRVNTEITKAPLSASMIKRYDEHHQDLTLLKALVRQQLPEKYKEIFFDQSKNGYAGYIDGGASQEEFYKFIKPILEKMDGTEELLVKLNREDLLRKQRTFDNGSIPHQIHLGELHAILRRQEDFYPFLKDNREKIEKILTFRIPYYVGPLARGNSRFAWMTRKSEETITPWNFEEVVDKGASAQSFIERMTNFDKNLPNEKVLPKHSLLYEYFTVYNELTKVKYVTEGMRKPAFLSGEQKKAIVDLLFKTNRKVTVKQLKEDYFKKIECFDSVEISGVEDRFNASLGTYHDLLKIIKDKDFLDNEENEDILEDIVLTLTLFEDREMIEERLKTYAHLFDDKVMKQLKRRRYTGWGRLSRKLINGIRDKQSGKTILDFLKSDGFANRNFMQLIHDDSLTFKEDIQKAQVSGQGDSLHEHIANLAGSPAIKKGILQTVKVVDELVKVMGRHKPENIVIEMARENQTTQKGQKNSRERMKRIEEGIKELGSQILKEHPVENTQLQNEKLYLYYLQNGRDMYVDQELDINRLSDYDVDHIVPQSFLKDDSIDNKVLTRSDKARGKSDNVPSEEVVKKMKNYWRQLLNAKLITQRKFDNLTKAERGGLSELDKAGFIKRQLVETRQITKHVAQILDSRMNTKYDENDKLIREVKVITLKSKLVSDFRKDFQFYKVREINNYHHAHDAYLNAVVGTALIKKYPKLESEFVYGDYKVYDVRKMIAKSEQEIGKATAKYFFYSNIMNFFKTEITLANGEIRKRPLIETNGETGEIVWDKGRDFATVRKVLSMPQVNIVKKTEVQTGGFSKESILPKRNSDKLIARKKDWDPKKYGGFDSPTVAYSVLVVAKVEKGKSKKLKSVKELLGITIMERSSFEKNPIDFLEAKGYKEVKKDLIIKLPKYSLFELENGRKRMLASAGELQKGNELALPSKYVNFLYLASHYEKLKGSPEDNEQKQLFVEQHKHYLDEIIEQISEFSKRVILADANLDKVLSAYNKHRDKPIREQAENIIHLFTLTNLGAPAAFKYFDTTIDRKRYTSTKEVLDATLIHQSITGLYETRIDLSQLGGDGGGGSPAPGGTLQLDDEYRLYSPLVKPDQNIQFWLEQFPQAWAETAGMGLAKQVPPQVIQLKASATPVSVRQYPLSKEAQEGIRPHVQRLIQQGILVPVQSPWNTPLLPVRKPGTNDYRPVQDLREVNKRVQDIHPTVPNPYNLLCALPPQRSWYTVLDLKDAFFCLRLHPTSQPLFAFEWRDPGTGRTGQLTWTRLPQGFKNSPTIFNEALHRDLANFRIQHPQVTLLQYVDDLLLAGATKQDCLEGTKALLLELSDLGYRASAKKAQICRREVTYLGYSLRDGQRWLTEARKKTVVQIPAPTTAKQVREFLGTAGFCRLWIPGFATLAAPLYPLTKPKGEFSWAPEHQKAFDAIKKALLSAPALALPDVTKPFTLYVDERKGVARGVLTQTLGPWRRPVAYLSKKLDPVASGWPVCLKAIAAVAILVKDADKLTLGQNITVIAPHALENIVRQPPDRWMTNARMTHYQSLLLTERVTFAPPAALNPATLLPEETDEPVTHDCHQLLIEETGVRKDLTDIPLTGEVLTWFTDGSSYVVEGKRMAGAAVVDGTRTIWASSLPEGTSAQKAELMALTQALRLAEGKSINIYTDSRYAFATAHVHGAIYKQRGWLTSAGREIKNKEEILSLLEALHLPKRLAIIHCPGHQKAKDPISRGNQMADRVAKQAAQGVNLLAGKRTADGSEFEKRTADGSEFESPKKKAKVE

SEQ ID NO: 21641 - protein, 2090 aa, synthetic construct
MPAAKRVKLDGGDKKYSIGLDIGTNSVGWAVITDEYKVPSKKFKVLGNTDRHSIKKNLIGALLFDSGETAEATRLKRTARRRYTRRKNRICYLQEIFSNEMAKVDDSFFHRLEESFLVEEDKKHERHPIFGNIVDEVAYHEKYPTIYHLRKKLVDSTDKADLRLIYLALAHMIKFRGHFLIEGDLNPDNSDVDKLFIQLVQTYNQLFEENPINASGVDAKAILSARLSKSRRLENLIAQLPGEKKNGLFGNLIALSLGLTPNFKSNFDLAEDAKLQLSKDTYDDDLDNLLAQIGDQYADLFLAAKNLSDAILLSDILRVNTEITKAPLSASMIKRYDEHHQDLTLLKALVRQQLPEKYKEIFFDQSKNGYAGYIDGGASQEEFYKFIKPILEKMDGTEELLVKLNREDLLRKQRTFDNGSIPHQIHLGELHAILRRQEDFYPFLKDNREKIEKILTFRIPYYVGPLARGNSRFAWMTRKSEETITPWNFEEVVDKGASAQSFIERMTNFDKNLPNEKVLPKHSLLYEYFTVYNELTKVKYVTEGMRKPAFLSGEQKKAIVDLLFKTNRKVTVKQLKEDYFKKIECFDSVEISGVEDRFNASLGTYHDLLKIIKDKDFLDNEENEDILEDIVLTLTLFEDREMIEERLKTYAHLFDDKVMKQLKRRRYTGWGRLSRKLINGIRDKQSGKTILDFLKSDGFANRNFMQLIHDDSLTFKEDIQKAQVSGQGDSLHEHIANLAGSPAIKKGILQTVKVVDELVKVMGRHKPENIVIEMARENQTTQKGQKNSRERMKRIEEGIKELGSQILKEHPVENTQLQNEKLYLYYLQNGRDMYVDQELDINRLSDYDVDHIVPQSFLKDDSIDNKVLTRSDKARGKSDNVPSEEVVKKMKNYWRQLLNAKLITQRKFDNLTKAERGGLSELDKAGFIKRQLVETRQITKHVAQILDSRMNTKYDENDKLIREVKVITLKSKLVSDFRKDFQFYKVREINNYHHAHDAYLNAVVGTALIKKYPKLESEFVYGDYKVYDVRKMIAKSEQEIGKATAKYFFYSNIMNFFKTEITLANGEIRKRPLIETNGETGEIVWDKGRDFATVRKVLSMPQVNIVKKTEVQTGGFSKESILPKRNSDKLIARKKDWDPKKYGGFDSPTVAYSVLVVAKVEKGKSKKLKSVKELLGITIMERSSFEKNPIDFLEAKGYKEVKKDLIIKLPKYSLFELENGRKRMLASAGELQKGNELALPSKYVNFLYLASHYEKLKGSPEDNEQKQLFVEQHKHYLDEIIEQISEFSKRVILADANLDKVLSAYNKHRDKPIREQAENIIHLFTLTNLGAPAAFKYFDTTIDRKRYTSTKEVLDATLIHQSITGLYETRIDLSQLGGDGGGGGPAPEAAAKGGTLQLDDEYRLYSPLVKPDQNIQFWLEQFPQAWAETAGMGLAKQVPPQVIQLKASATPVSVRQYPLSKEAQEGIRPHVQRLIQQGILVPVQSPWNTPLLPVRKPGTNDYRPVQDLREVNKRVQDIHPTVPNPYNLLCALPPQRSWYTVLDLKDAFFCLRLHPTSQPLFAFEWRDPGTGRTGQLTWTRLPQGFKNSPTIFNEALHRDLANFRIQHPQVTLLQYVDDLLLAGATKQDCLEGTKALLLELSDLGYRASAKKAQICRREVTYLGYSLRDGQRWLTEARKKTVVQIPAPTTAKQVREFLGTAGFCRLWIPGFATLAAPLYPLTKPKGEFSWAPEHQKAFDAIKKALLSAPALALPDVTKPFTLYVDERKGVARGVLTQTLGPWRRPVAYLSKKLDPVASGWPVCLKAIAAVAILVKDADKLTLGQNITVIAPHALENIVRQPPDRWMTNARMTHYQSLLLTERVTFAPPAALNPATLLPEETDEPVTHDCHQLLIEETGVRKDLTDIPLTGEVLTWFTDGSSYVVEGKRMAGAAVVDGTRTIWASSLPEGTSAQKAELMALTQALRLAEGKSINIYTDSRYAFATAHVHGAIYKQRGWLTSAGREIKNKEEILSLLEALHLPKRLAIIHCPGHQKAKDPISRGNQMADRVAKQAAQGVNLLAGKRTADGSEFEKRTADGSEFESPKKKAKVE

SEQ ID NO: 21642 - protein, 2082 aa, synthetic construct; identical to SEQ ID NO: 21472

SEQ ID NO: 21643 - protein, 2090 aa, synthetic construct
MPAAKRVKLDGGDKKYSIGLDIGTNSVGWAVITDEYKVPSKKFKVLGNTDRHSIKKNLIGALLFDSGETAEATRLKRTARRRYTRRKNRICYLQEIFSNEMAKVDDSFFHRLEESFLVEEDKKHERHPIFGNIVDEVAYHEKYPTIYHLRKKLVDSTDKADLRLIYLALAHMIKFRGHFLIEGDLNPDNSDVDKLFIQLVQTYNQLFEENPINASGVDAKAILSARLSKSRRLENLIAQLPGEKKNGLFGNLIALSLGLTPNFKSNFDLAEDAKLQLSKDTYDDDLDNLLAQIGDQYADLFLAAKNLSDAILLSDILRVNTEITKAPLSASMIKRYDEHHQDLTLLKALVRQQLPEKYKEIFFDQSKNGYAGYIDGGASQEEFYKFIKPILEKMDGTEELLVKLNREDLLRKQRTFDNGSIPHQIHLGELHAILRRQEDFYPFLKDNREKIEKILTFRIPYYVGPLARGNSRFAWMTRKSEETITPWNFEEVVDKGASAQSFIERMTNFDKNLPNEKVLPKHSLLYEYFTVYNELTKVKYVTEGMRKPAFLSGEQKKAIVDLLFKTNRKVTVKQLKEDYFKKIECFDSVEISGVEDRFNASLGTYHDLLKIIKDKDFLDNEENEDILEDIVLTLTLFEDREMIEERLKTYAHLFDDKVMKQLKRRRYTGWGRLSRKLINGIRDKQSGKTILDFLKSDGFANRNFMQLIHDDSLTFKEDIQKAQVSGQGDSLHEHIANLAGSPAIKKGILQTVKVVDELVKVMGRHKPENIVIEMARENQTTQKGQKNSRERMKRIEEGIKELGSQILKEHPVENTQLQNEKLYLYYLQNGRDMYVDQELDINRLSDYDVDHIVPQSFLKDDSIDNKVLTRSDKARGKSDNVPSEEVVKKMKNYWRQLLNAKLITQRKFDNLTKAERGGLSELDKAGFIKRQLVETRQITKHVAQILDSRMNTKYDENDKLIREVKVITLKSKLVSDFRKDFQFYKVREINNYHHAHDAYLNAVVGTALIKKYPKLESEFVYGDYKVYDVRKMIAKSEQEIGKATAKYFFYSNIMNFFKTEITLANGEIRKRPLIETNGETGEIVWDKGRDFATVRKVLSMPQVNIVKKTEVQTGGFSKESILPKRNSDKLIARKKDWDPKKYGGFDSPTVAYSVLVVAKVEKGKSKKLKSVKELLGITIMERSSFEKNPIDFLEAKGYKEVKKDLIIKLPKYSLFELENGRKRMLASAGELQKGNELALPSKYVNFLYLASHYEKLKGSPEDNEQKQLFVEQHKHYLDEIIEQISEFSKRVILADANLDKVLSAYNKHRDKPIREQAENIIHLFTLTNLGAPAAFKYFDTTIDRKRYTSTKEVLDATLIHQSITGLYETRIDLSQLGGDGGEAAAKGGGPAPGGTLQLDDEYRLYSPLVKPDQNIQFWLEQFPQAWAETAGMGLAKQVPPQVIQLKASATPVSVRQYPLSKEAQEGIRPHVQRLIQQGILVPVQSPWNTPLLPVRKPGTNDYRPVQDLREVNKRVQDIHPTVPNPYNLLCALPPQRSWYTVLDLKDAFFCLRLHPTSQPLFAFEWRDPGTGRTGQLTWTRLPQGFKNSPTIFNEALHRDLANFRIQHPQVTLLQYVDDLLLAGATKQDCLEGTKALLLELSDLGYRASAKKAQICRREVTYLGYSLRDGQRWLTEARKKTVVQIPAPTTAKQVREFLGTAGFCRLWIPGFATLAAPLYPLTKPKGEFSWAPEHQKAFDAIKKALLSAPALALPDVTKPFTLYVDERKGVARGVLTQTLGPWRRPVAYLSKKLDPVASGWPVCLKAIAAVAILVKDADKLTLGQNITVIAPHALENIVRQPPDRWMTNARMTHYQSLLLTERVTFAPPAALNPATLLPEETDEPVTHDCHQLLIEETGVRKDLTDIPLTGEVLTWFTDGSSYVVEGKRMAGAAVVDGTRTIWASSLPEGTSAQKAELMALTQALRLAEGKSINIYTDSRYAFATAHVHGAIYKQRGWLTSAGREIKNKEEILSLLEALHLPKRLAIIHCPGHQKAKDPISRGNQMADRVAKQAAQGVNLLAGKRTADGSEFEKRTADGSEFESPKKKAKVE

SEQ ID NO: 21644 - protein, 4 aa, unidentified
YADD

SEQ ID NO: 21645 - protein, 4 aa, unidentified
YMDD

SEQ ID NO: 21646 - protein, 4 aa, unidentified
YVDD

SEQ ID NO: 21647 - protein, 9 aa, unidentified
LAGLIDADG

SEQ ID NO: 21648 - RNA, 100 nt, synthetic construct
  source 1..100: mol_type = other RNA
  misc_difference 1..100: note = This sequence may encompass 5, 10, 20, 30, 50, 70, 100 nucleotides
aaaaaaaaaaaaaaaaaaaaaaaaaaaaaaaaaaaaaaaaaaaaaaaaaaaaaaaaaaaaaaaaaaaaaaaaaaaaaaaaaaaaaaaaaaaaaaaaaaaa
